(19) United States
(12) Patent Application Publication
(10) Pub. No.: US 2024/0139320 A1
(43) Pub. Date: May 2, 2024

(54) CHIMERIC ANTIGEN RECEPTOR (CAR) SIGNALING MOLECULES FOR CONTROLLED AND SPECIFIC CAR T CELL ACTIVITY

(71) Applicant: The Board of Trustees of the Leland Stanford Junior University, Stanford, CA (US)

(72) Inventors: Robbie G. Majzner, Palo Alto, CA (US); Aidan Tousley, Stanford, CA (US); Louai Labanieh, Stanford, CA (US); Crystal L. Mackall, Stanford, CA (US); Maria Caterina Rotiroti, Stanford, CA (US)

(21) Appl. No.: 18/547,652

(22) PCT Filed: Feb. 23, 2022
(86) PCT No.: PCT/US2022/017544

§ 371 Date: Aug. 23, 2023

Related U.S. Application Data
(60) Provisional application No. 63/153,033, filed on Feb. 24, 2021.

(51) Int. Cl. A61K 39/00; A61P 35/00; C07K 14/705; C07K 14/725; C07K 14/73; C07K 16/32; C12N 5/0783; C12N 9/12; C12N 9/16

(52) U.S. Cl. CPC A61K 39/4631; A61K 39/4611; A61K 39/4644; A61P 35/00; C07K 14/7051; C07K 14/70514; C07K 14/70517; C07K 14/70521; C07K 16/32; C12N 5/0636; C12N 9/12; C12N 9/16; C12Y 207/10002; C12Y 301/04011; C07K 2317/31; C07K 2317/35; C07K 2319/02; C07K 2319/03

(57) ABSTRACT

The present disclosure generally relates to, inter alia, chimeric antigen receptors (CARs) that contain an intracellular signaling domain without an immune receptor tyrosine based activation motif (ITAM). The disclosure also provides compositions and methods useful for producing such molecules, as well as methods for the detection and treatment of diseases, such as cancer.

### RELATED APPLICATIONS

[0001] This application claims priority to and benefit of U.S. Provisional Application No. 63/153,033, filed on Feb. 24, 2021; the contents of which are hereby incorporated in its entirety.

### STATEMENT REGARDING FEDERALLY SPONSORED R&D

[0002] The invention was made with government support under grant no. 1P01CA217959-01 (P01) and 1DP2CA272092-01 (DP2) awarded by National Institutes of Health. The government has certain rights in the present invention.

### INCORPORATION BY REFERENCE

[0003] This application contains a Sequence Listing, which is hereby incorporated herein by reference in its entirety. The accompanying Sequence Listing text file, named “078430-524001WO_SequenceListing_ST25.txt,” was created on Feb. 18, 2022 and is 893,877 bytes.

### FIELD

[0004] The present disclosure relates generally to the fields of oncology and immuno-therapeutics, and particularly relates to compositions of polypeptides, e.g., chimeric antigen receptors (CARs) that have enhanced efficacy and/or can be used for logic gating to target and eliminate specific cells (e.g., cancer cells) when multiple antigens are present. The disclosure also provides compositions and methods useful for producing such molecules, as well as methods for the detection and treatment of conditions, such as diseases (e.g., cancer or autoimmune diseases).

### BACKGROUND

[0005] Chimeric antigen receptor (CAR) T cells have revolutionized the care of patients with relapsed and refractory B cell malignancies, but have not yet demonstrated substantial therapeutic benefit in patients with solid tumors. Complete response rates of up to 90% for CD19 CAR T cells in patients with leukemia illustrate the enormous potential of these therapeutics to revolutionize care of solid tumors if they could be unleashed safely. However, the lack of truly tumor-specific cell surface antigens has hampered development of CARs for solid tumors due to concerns about on-target killing of normal tissues that share the target antigen (known as “on-target, off tumor toxicity”), as has been observed in early phase clinical trials and in preclinical models. CAR T cells cannot discriminate between cancer and normal tissue if both express the target antigen. To date, no system developed can effectively overcome this intractable problem, greatly limiting the number of potential therapeutic targets and diseases that can be treated. Consequently, there remains a need for more potent and specific CARs to overcome these obstacles to extend the reach of these therapeutics to more diseases and to treat more patients.

### SUMMARY

[0006] The present disclosure relates generally to the development of immuno-therapeutics, including recombinant polypeptides such as chimeric antigen receptors (CARs), either alone or in combination as Boolean logic AND gates, as well as pharmaceutical compositions containing the same for use in treating various conditions, such as diseases (e.g., cancer). As described in greater detail below, various modifications of the intracellular signaling domain (a.k.a. cytosolic signaling region) have been found to have dramatic effects on the CAR's potency and specificity to antigens. In some embodiments, the intracellular signaling domains of these CAR molecules do not have an immune receptor tyrosine based activation motif (ITAM), such as CD3zeta (CD3ζ). Furthermore, experimental results described herein have demonstrated that combinations of these CARs similar to Boolean logic gates (e.g. AND) integrate signals based on the presence of multiple antigens, which would drastically increase their safety. Domain swap and mutations have been used to engineer CAR molecules or CAR molecule combinations with enhanced specificity and/or potency.

[0007] In one aspect, provided herein is a chimeric antigen receptor (CAR) polypeptide including:
[0008] a) an extracellular ligand-binding domain having a binding affinity for a ligand;
[0009] b) a transmembrane domain; and
[0010] c) an intracellular signaling domain,
[0011] wherein binding of the ligand to the extracellular ligand-binding domain activates the intracellular signaling domain,
[0012] and wherein the intracellular signaling domain does not have an immune receptor tyrosine based activation motif (ITAM).

[0013] Non-limiting exemplary embodiments of the disclosed chimeric antigen receptor (CAR) polypeptide of the disclosure include one or more of the following features. In some embodiments, the CAR polypeptide has the multiple domains described in a) to c) above, in N-terminal to C-terminal direction. In some embodiments, the intracellular signaling domain has a full-length or biologically active fragment of a protein kinase, a G protein, a GTP-binding protein, an adaptor signaling protein, or a scaffold protein capable of inducing cell activation. In some embodiments, the intracellular signaling domain does not have a CD3ζ domain. In some embodiments, the intracellular signaling domain contains ZAP70, PLCG1, PKC, ITK, NCK, VAV1, GRB2, GADS, SOS1, ADAP, SYK, LYN, PI3K, BLNK, or a biologically active fragment, mutant, or variant thereof. In some embodiments, a CAR molecule disclosed herein contains more than one intracellular signaling domain selected from the group consisting of ZAP70, PLCG1, PKC, ITK, NCK, VAV1, GRB2, GADS, SOS1, ADAP, SYK, LYN, PI3K, BLNK, and a biologically active fragment, mutant, or variant thereof.

[0014] In some embodiments, the intracellular signaling domain contains ZAP70 or PLCG1, or a biologically active fragment, mutant, or variant thereof. In some embodiments, the biologically active fragment, mutant, or variant thereof is a fragment containing the full-length or a fragment of Interdomain B and the kinase domain from ZAP70, or a mutant or variant thereof. In some embodiments, the biologically active fragment, mutant, or variant thereof contains the full-length or a fragment of a ZAP70²⁵⁵⁻⁶⁰⁰ fragment. In some embodiments, the biologically active fragment, mutant, or variant thereof contains:
[0015] i) a ZAP70³⁰⁸⁻⁶⁰⁰ fragment, a ZAP70²⁸⁰⁻⁶⁰⁰ fragment, or a ZAP70²⁵⁵⁻⁶⁰⁰ fragment;
[0016] ii) a ZAP70³⁰⁸⁻⁶⁰⁰ fragment, a ZAP70²⁸⁰⁻⁶⁰⁰ fragment, or a ZAP70²⁵⁵⁻⁶⁰⁰ fragment, further containing at least one of the mutations at the position of Y292, Y492, K544, Y597, Y598, V314, D327, R360, and K362;
[0017] iii) a ZAP70³⁰⁸⁻⁶⁰⁰ fragment, a ZAP70²⁸⁰⁻⁶⁰⁰ fragment, or a ZAP70²⁵⁵⁻⁶⁰⁰ fragment, further containing at least one of the mutations of Y292F, Y492F, K544R, Y597F, Y598F, V314A, D327P, R360P, and K362E;
[0018] iv) a ZAP70^{255-600 Y292F} fragment;
[0019] v) a ZAP70^{255-600 Y492F} fragment;
[0020] vi) a ZAP70^{255-600 K544R} fragment;
[0021] vii) a ZAP70^{255-600 Y597F Y598F} fragment;
[0022] viii) a ZAP70³⁰⁸⁻⁶⁰⁰ fragment, a ZAP70²⁸⁰⁻⁶⁰⁰ fragment, or a ZAP70²⁵⁵⁻⁶⁰⁰ fragment, further containing at least one costimulatory domain;
[0023] ix) a ZAP70³⁰⁸⁻⁶⁰⁰ fragment, a ZAP70²⁸⁰⁻⁶⁰⁰ fragment, or a ZAP70²⁵⁵⁻⁶⁰⁰ fragment, further containing a 4-1BB costimulatory domain;
[0024] x) a ZAP70³⁰⁸⁻⁶⁰⁰ fragment, a ZAP70²⁸⁰⁻⁶⁰⁰ fragment, or a ZAP70²⁵⁵⁻⁶⁰⁰ fragment, further containing a CD28 costimulatory domain;
[0025] xi) a ZAP70^{255-600 V314A} fragment;
[0026] xii) a ZAP70^{255-600 D327P} fragment;
[0027] xiii) a ZAP70^{255-600 R360P} fragment; and/or
[0028] xiv) a ZAP70^{255-600 K362E} fragment.

[0029] In some embodiments, the intracellular signaling domain described herein has an amino acid sequence having at least 20%, 25%, 30%, 35%, 40%, 45%, 50%, 55%, 60%, 65%, 70%, 75%, 80%, 85%, 90%, 95%, 99%, or more identity to any one of SEQ ID NOs: 11-26, 103-110, 163, 165, 167, 169, 177, 179, 185, 188, 191, 193, and 195. In some embodiments, the intracellular signaling domain described herein has an amino acid sequence having at least 50%, 60%, 70%, 75%, 80%, 90%, 95%, 99%, or more identity to any one of SEQ ID NOs: 11-26 and 103-110, 163, 165, 167, 169, 177, 179, 185, 188, 191, 193, and 195. In some embodiments, the intracellular signaling domain has an amino acid sequence of any one of SEQ ID NOs: 11-26, 103-110, 163, 165, 167, 169, 177, 179, 185, 188, 191, 193, and 195. In some embodiments, the intracellular signaling domain consists of an amino acid sequence of any one of SEQ ID NOs: 11-26, 103-110, 163, 165, 167, 169, 177, 179, 185, 188, 191, 193, and 195.

[0030] In some embodiments, the extracellular ligand-binding domain (a.k.a., extracellular antigen-binding domain) has a ligand-binding domain of an antibody, an antigen-binding fragment, an antibody mimetic, a receptor, a peptide specifically binding to a ligand or antigen, or a ligand for a targeted receptor. In some embodiments, the antibody or the antigen-binding fragment is selected from the group consisting of a monoclonal antibody, an antigen-binding fragment (Fab), a nanobody, a diabody, a triabody, a minibody, an F(ab′)₂ fragment, an F(ab)v fragment, a single chain variable fragment (scFv), a single domain antibody (sdAb), a VH domain, a VL domain, an Fv fragment, a VNAR domain, and a VHH domain. In some embodiments, the antibody mimetic is selected from the group consisting of: Affibody molecules, Affilins, Affimers, Alphabodies, Avimers, DARPins, Fynomers, Kunitz domain peptides, Monobodies, nanoCLAMPs, and a biologically active fragment thereof. In some embodiments, the receptor is NKG2D or a biologically active fragment thereof. In some embodiments, the ligand for a targeted receptor is an IL-13 polypeptide, an IL-13 mutein, chlorotoxin, or a biologically active fragment thereof. In some embodiments, the extracellular ligand-binding domain is multivalent (e.g., bivalent). In some embodiments, the extracellular ligand-binding domain is multispecific (e.g., bispecific).

[0031] In some embodiments, the ligand or antigen recognized by the extracellular ligand-binding domain localizes on the surface of a cell. In some embodiments, the ligand or antigen is an adaptor molecule. In some embodiments, the adaptor is specifically recognized by a cell (e.g., a cancer cell, or a cell correlated to a disease or disorder described herein, such as proliferative diseases (e.g., cancers), hematological malignancies, solid tumors, autoimmune diseases, inflammations, allergic diseases, infections, senescence/aging, etc.). Non-limiting examples of suitable ligand types include cell surface receptors, adhesion proteins, carbohydrates, lipids, glycolipids, lipoproteins, and lipopolysaccharides that are surface-bound, integrins, mucins, and lectins. In some embodiments, the ligand is a protein. In some embodiments, the ligand is a carbohydrate. In some embodiments, the ligand is at least one selected from the group consisting of: CD19, HER2, ROR1, B7-H3 (CD276), influenza hemagglutinin (HA), CD22, IL13Ra2, CD2, CD5, CD6, FcγR1, integrins, gangliosides, and glycopeptides. In some embodiments, the ligand is at least one selected from the group consisting of: CD1a, CD1b, CD1c, CD2, CD3, CD4, CD5, CD6, CD7, CD8, CD9, CD10, CD11a, CD11b, CD11c, CD12, CD13, CD14, CD15 (SSEA-1), CD16 (FcγRIII), CD17, CD18, CD19, CD20, CD21, CD22, CD23, CD24, CD25, CD26, CD27, CD28, CD29, CD30, CD31, CD32 (FcγRII), CD33, CD34, CD35, CD36, CD37, CD38, CD39, CD40, CD41, CD43, CD44, CD44V6, CD45, CD45R/B220, CD45RO, CD49b, CD49d, CD49f, CD52, CD53, CD54, CD56 (NCAM), CD57, CD61 (integrin β3), CD62L, CD63, CD64, CD66b, CD68, CD69, CD70, CD73, CD74, CD79a (Igα), CD79b (Igβ), CD80, CD83, CD85k (ILT3), CD86, CD88, CD93 (C1Rqp), CD94, CD95, CD99, CD103, CD105 (Endoglin), CD107a, CD107b, CD114 (G-CSFR), CD115, CD117, CD122, CD123, CD129, CD133, CD134, CD138 (Syndecan-1), CD141, CD146, CD152 (CTLA-4), CD158 (Kir), CD161 (NK-1.1), CD163, CD183, CD191, CD193 (CCR3), CD194 (CCR4), CD195 (CCR5), CD197 (CCR7), CD203c, CD205 (DEC-205), CD207 (Langerin), CD209 (DC-SIGN), CD223, CD235, CD244 (2B4), CD252 (OX40L), CD267, CD268 (BAFF-R), CD273 (B7-DC, PD-L2), CD276 (B7-H3), CD279 (PD1), CD282 (TLR2), CD284 (TLR4), CD294, CD304 (Neuropilin-1), CD305, CD314 (NKG2D), CD319 (CRACC), CD326, CD328 (Siglec-7), CD335 (NKp46), fetal acetylcholine receptor (AChR), ADGRE2, alpha-fetoprotein (AFP), ALK, BCMA, BDCA3, C3AR, Lewis A (CA19.9), carbonic anhydrase IX (CA1X), calretinin, cancer antigen-125 (CA-125), CCR1, CCR4, CDS, carcinoembryonic antigen (CEA), chromogranin, CLEC12A, an antigen of a cytomegalovirus (CMV) infected cell (e.g., a cell surface antigen), CS-1, CSPG4, cytokeratin, desmin, DLK1, DLL3, EGFRvIII (epidermal growth factor variant III), EGFR and isovariants thereof, epithelial cell adhesion molecule (EpCAM), epithelial glycoprotein2 (EGP 2), epithelial glycoprotein-40 (EGP-40), epithelial membrane protein (EMA), ERBB, epithelial tumor antigen (ETA), FAP, folate-binding protein (FBP), FcγR1, FcεRIα, FITC, FLT3, FOLR1, FOLR3, galactin, ganlgiosides, gross cystic disease fluid protein (GCDFP-15), GD2 (ganglioside G2), GD3, GM2, GM3, glial fibrillary acidic protein (GFAP), gpA33, glycopeptides, Glypican 2 (GPC2), oncofetal antigen (h5T4), influenza hemagglutinin (HA), human epidermal growth factor receptor 2 (Her2/neu), HLA-DR, HM1.24, HMB-45 antigen, HPV E6, HPV E7, ICAM-1, IgG, IgD, IgE, IgM, IL-13-receptor alpha 1, integrins, Integrin B7, Interleukin-13 receptor subunit alpha-2 (IL-13Rα2), Kappa light chain, kinase insert domain receptor (KDR), Lamba light chain, LILRB2, Lewis Y (LeY), LGR5, Ly49, Ly108, L1 cell adhesion molecule (L1-CAM), melanoma-associated antigen (MAGE), melanoma antigen family A 1 (MAGE-A1), protein melan-A (melanoma antigen recognized by T lymphocytes; MART-1), MCSP, c-Met, MICA/B, mesothelin, muscle-specific actin (MSA), Mesothelin (MSLN), the dimeric form of the pyruvate kinase isoenzyme type M2 (tumor M2-PK), Mucin 1 (Muc-1), Mucin 16 (Muc-16), myo-D1, Necl-2, neurofilament, NKCSI, NKG2D, neuron-specific enolase (NSE), NY-ESO, cancer-testis antigen NY-ESO-1, an abnormal p53 protein, PAP (prostatic acid phosphatase), PAMA, P-cadherin, placental alkaline phosphatase, PRAIVIE, prostein, prostate stem cell antigen (PSCA), prostate-specific membrane antigen (PSMA), Ral-B, K-Ras (V-Ki-ras2 Kirsten rat sarcoma viral oncogene), an abnormal ras protein, ROR1, SLAMF7/CS1, receptor tyrosine-protein kinases erb-B2,3,4, sperm protein 17 (Sp17), STEAP1 (six-transmembrane epithelial antigen of the prostate 1), synaptophysin, tumor-associated glycoprotein 72 (TAG-72), TALLA-1, TARP (T cell receptor gamma alternate reading frame protein), TEM-8, human telomerase reverse transcriptase (hTERT), TIM-3, TLR4, TRBC1, TRBC2, Trp-p8, thyroglobulin, thyroid transcription factor-1, TYRP1, tyrosinase, vascular endothelial growth factor R2 (VEGF-R2), Vα24, Wilms tumor protein (WT-1), and various pathogen antigen known in the art.

[0032] In some embodiments, binding of the ligand or antigen leads to activation of the intracellular signaling domain of a CAR molecule described herein. In some embodiments, activation of the intracellular signaling domain leads to activation of a cell (e.g., a T cell) expressing the CAR molecule described herein. In some embodiments, activation of a cell expressing a CAR molecule described herein (e.g., a T cell activation) promotes cellular functions, such as functions to regulate a target cell. In some embodiments, activation of a T cell expressing a CAR molecule described herein promotes T cell functions, such as inhibiting and/or killing a target cell expressing at least one ligand or antigen specifically recognized by the CAR molecule, as well as a target cell recognizable by the CAR molecule through an adaptor molecule. In some embodiments, the target cell described herein is a cell in a microenvironment of a biological sample. In some embodiments, the target cell is a cell in a microenvironment of a disease or disorder (e.g., cancer). In some embodiments, the target cell is correlated to a disease or disorder. Exemplary diseases or disorders may include, e.g., cancers, hematological malignancies, solid tumors, autoimmune diseases, inflammations, allergic diseases, infections, senescence/aging, etc. In some embodiments, the target cell is a cancer cell (e.g., a tumor cell, a solid tumor cell, etc.).

[0033] In some embodiments, the transmembrane (TM) domain described herein is derived from a transmembrane domain of CD4, CD8, CD28, PD-1, OX40, 4-1BB, CTLA-4, or CD2. In some embodiments, the transmembrane (TM) domain described herein has a transmembrane domain of CD4, CD8, or CD28. In some embodiments, the transmembrane (TM) domain described herein is derived from a transmembrane domain of CD28, CD8, CD4, CD3, CTLA-4, OX40, 4-1BB, CD2, PD-1, CD3D, CD3E, CD3G, CD3zeta, CD8a, CD8b, CD16, CD25, CD27, CD40, CD79A, CD79B, CD80, CD84, CD86, CD95, CD150 (SLAMF1), CD166, CD200R, CD223 (AG3), CD270 (HVEM), CD272 (BTLA), CD273 (PD-L2), CD274 (PD-L1), CD278 (ICOS), CD300, CD357 (GITR), A2aR, ICAM-1, 2B4, BTLA, DAP10, FcRα, FcRβ, Fyn, GAL9, IL7, IL12, IL15, KIR, KIR2DL4, KIR2DS1, LAG-3, Lck, LAT, LPA5, LRP, NKp30, NKp44, NKp46, NKG2C, NKG2D, NOTCH1, NOTCH2, NOTCH3, NOTCH4, PTCH2, ROR2, Ryk, SLP-76, SIRPα, pTα, T cell receptor polypeptides (e.g., TCRα and TCRβ), TIM3, TRIM, and ZAP70.

[0034] In some embodiments, the CAR polypeptide described herein further has a hinge domain. In some embodiments, the hinge domain is derived from a hinge domain of CD8, CD28, CD4, IgG (e.g., IgG4), PD-1, CTLA-4, or CD2. In some embodiments, the hinge domain is a hinge domain of CD8, CD28, CD4, or IgG (e.g., IgG4). In some embodiments, the hinge domain described herein is derived from a CD8 hinge domain, a CD28 hinge domain, a CD4 hinge domain, a PD-1 hinge domain, a CD2 hinge domain, a CTLA4 hinge domain, an IgG4 hinge domain, a human CD8α (a.k.a. CD8a), LFA-1 (CD11a/CD18), CD5, CD27 (TNFRSF7), CD70, 4-1BB, OX40 (CD134), ICOS (CD278), IgG1 Fc region, IgG2 Fc region, IgG3 Fc region, IgG4 Fc region, IgE Fc region, IgM Fc region, IgA Fc region, or a combination thereof.

[0035] In some embodiments, the CAR polypeptide described herein further has a costimulatory domain. In some embodiments, the costimulatory domain is derived from a costimulatory domain of CD28, ICOS (CD278), CD27, 4-1BB (CD137), OX40 (CD134), CD2, CD4, CD5, CD7, CD8, CD8α, CD8β, CD11a, CD11b, CD11c, CD11d, CD18, CD19, CD19a, CD29, CD30, CD30L, CD40, CD40L (CD154), CD48, CD49a, CD49D, CD49f, CD58, CD53, ICAM-1 (CD54), CD69, CD70, CD80 (B7-1), CD82, CD83, CD84, CD86 (B7-2), CD90, CD96, CD100, CD103, CD122, CD132, CD150 (SLAMF1), CD160 (BY55), CD162 (DNAM1), CD223 (LAG3), CD226, CD229, CD244, CD270 (HVEM), CD273 (PD-L2), CD274 (PD-L1), CD278, LAT, lymphocyte function-associated antigen-1 (LFA-1), LIGHT, NKG2C, NKG2D, NKp30, NKp44, NKp46, NKp80 (KLRF1), B7-H2, B7-H3, CD83 ligand, PD-1, SLP-76, Toll-like receptors (TLRs, such as TLR2), DAP10, DAP12, LAG-3, 2B4, CARD1, CTLA-4 (CD152), TRIM, ZAP70, FcERIγ, 4-1BBL, BAFF, GADS, GITR, GITR-L, BAFF-R, HVEM, CD27L, OX40L, TAC1, BLAME, CRACC, CD2F-10, NTB-A, integrin α4, integrin α4β1, integrin α4β7, IA4, ICAM-1, IL2Rβ, IL2Rγ, IL7Rα, ITGA4, ITGA6, ITGAD, ITGAE, ITGAL, ITGAM, ITGAX, ITGB1, ITGB2, ITGB7, KIRDS2, LTBR, PAG/Cbp, PSGL1, SLAMF6 (NTB-A, Ly108), SLAMF7, SLP-76, TNFR2, TRANCE/RANKL, VLA1, VLA-6, BTLA, ikaros, LAG-3, LMIR, CEACAM1, CRTAM, TCL1A, DAP12, TIM-1, Dectin-1, PDCD6, PD-1, TIM-4, TSLP, EphB6, TSLP-R, HLA-DR, or any combination thereof. In some embodiments, the costimulatory domain is a costimulatory domain of CD28, ICOS, CD27, 4-1BB, OX40, or CD40L.

[0036] In some embodiments, the CAR polypeptide described herein further has at least one mutation from a wild type (e.g., naturally occurring) sequence in at least one of domains described herein. In some embodiments, of the at least one mutation is selected from the mutations listed in the below section titled “Mutations to chimeric antigen receptors (CARs)”.

[0037] In some embodiments, the CAR polypeptide described herein has an amino acid sequence having at least 20%, 25%, 30%, 35%, 40%, 45%, 50%, 55%, 60%, 65%, 70%, 75%, 80%, 85%, 90%, 95%, 99%, or more identity to any one of SEQ ID NOs: 27-49, 111-123, 148-151, 162, 164, 166, 168, 170-176, 178, 180-184, 186, 187, 189, 190, 192, 194, 196, and 198-204. In some embodiments, the CAR polypeptide described herein has an amino acid sequence having at least 50%, 60%, 70%, 75%, 80%, 90%, 95%, 99%, or more identity to any one of SEQ ID NOs: 27-49, 111-123, 148-151, 162, 164, 166, 168, 170-176, 178, 180-184, 186, 187, 189, 190, 192, 194, 196, and 198-204. In some embodiments, the CAR polypeptide described herein has an amino acid sequence of any one of SEQ ID NOs: 27-49, 111-123, 148-151, 162, 164, 166, 168, 170-176, 178, 180-184, 186, 187, 189, 190, 192, 194, 196, and 198-204. In some embodiments, the CAR polypeptide described herein consists of an amino acid sequence of any one of SEQ ID NOs: 27-49, 111-123, 148-151, 162, 164, 166, 168, 170-176, 178, 180-184, 186, 187, 189, 190, 192, 194, 196, and 198-204.

[0038] In some embodiments, the CAR polypeptide described herein is capable of activating a cell expressing the CAR polypeptide. In some embodiments, the cell is an immune cell. In some embodiments, the immune cell is a T cell, a regulatory T cell (Treg), a natural killer (NK) cell, a macrophage, a monocyte, a stem cell, a natural killer T (NKT) cell, a gamma delta T cell, or an induced pluripotent stem cell (iPSC)-derived T cell. In some embodiments, the cell is a non-immune cell.

[0039] In some embodiments, activation of the CAR polypeptide increases cytokine production in a T cell expressing the CAR polypeptide. In some embodiments, the cytokine includes IL-2, TNF-α, and/or IFN-γ. For example, cytokine production may be increased by at least 10%, 20%, 30%, 40%, 50%, 60%, 70%, 80%, 90%, 100%, 150%, 200%, 250%, 3-fold, 5-fold, 10-fold, 20-fold, 50-fold, 100-fold, 200-fold, 500-fold, 1000-fold, or more that a control T cell not expressing the CAR polypeptide or a control T cell expressing a CAR molecule containing CD3zeta.

[0040] In some embodiments, the CAR polypeptide described herein is capable of reducing T cell exhaustion, compared to a CAR polypeptide containing CD3zeta. Such reduction may be at most 90%, 80%, 70%, 60%, 50%, 40%, 30%, 20%, 10%, 5%, 1%, 0.5%, 0.1%, or less that the T cell exhaustion in a control T cell expressing a CAR molecule containing CD3zeta. In some embodiments, the CAR polypeptide described herein is capable of reducing T cell exhaustion while further maintaining its efficacy/potency. In some embodiments, the reduction of T cell exhaustion is in comparison to the level of T cell exhaustion when the T cell expresses a traditional CAR polypeptide having a different intracellular signaling domain (e.g., CD3zeta). For example, T cell exhaustion may be reduced to 90%, 80%, 70%, 60%, 50%, 40%, 30%, 20%, 10%, 5%, 1%, or less than a control T cell not expressing the CAR polypeptide described herein. The levels of T cell exhaustion may be represented by any methods known in the art, such as expression of surface markers, the levels of cytokine production by the T cell in the absence of tumor or target cells and/or the cytotoxicity of the T cell. In some embodiment, reducing T cell exhaustion by the CAR polypeptide described herein results in an increase of cytokine production by the T cell and/or the cytotoxicity of the T cell, and/or a prolonged timeframe for the T cell to maintain certain levels of cytokine production and/or cytotoxicity.

[0041] In another aspect, provided herein is a polynucleotide encoding the chimeric antigen receptor (CAR) polypeptide described herein.

[0042] In another aspect, provided herein is an expression vector containing the polynucleotide described herein. In some embodiments, the polynucleotide is a recombinant and/or isolated polynucleotide.

[0043] In another aspect, provided herein is a cell expressing the CAR polypeptide described herein. In some embodiments, the cell is an immune cell. In some embodiments, the immune cell is a T cell, a regulatory T cell (Treg), a natural killer (NK) cell, a macrophage, a monocyte, a stem cell, a natural killer T (NKT) cell, a gamma-delta T cell, an induced pluripotent stem cell (iPSC)-derived NK cell, or an induced pluripotent stem cell (iPSC)-derived T cell. In some embodiments, the cell is a non-immune cell.

[0044] In another aspect, provided herein is a composition containing the CAR polypeptide, a polynucleotide encoding the CAR polypeptide, an expression vector, and/or a cell, as described herein. In some embodiments, the cell is a regulatory T cell (Treg).

[0045] In another aspect, provided herein is a pharmaceutical composition containing the CAR polypeptide, a polynucleotide encoding the CAR polypeptide, an expression vector, a cell, and/or a composition as described herein, plus a pharmaceutically acceptable carrier.

[0046] In another aspect, provided herein is a method of preparing or producing the CAR polypeptide described herein. For example, the method may include introducing a polynucleotide or an expression vector described herein into a cultured cell and inducing expression of the CAR polypeptide under a condition. In some embodiments, the method further includes purifying and/or separating the produced CAR polypeptide from the cultured cell. In some embodiments, the cultured cell is a regulatory T cell (Treg).

[0047] In another aspect, provided herein is a method for selectively activating a cell including contacting the cell with a ligand, wherein the cell expresses the CAR polypeptide, as described herein, wherein the binding of the ligand to the extracellular ligand-binding domain activates the intracellular signaling domain of the CAR polypeptide, thereby activating the cell. In some embodiments, the cell is a regulatory T cell (Treg).

[0048] In another aspect, provided herein is a method of antagonizing or killing a target cell including contacting the target cell with a cell expressing the CAR polypeptide described herein, wherein the target cell expresses or specifically recognizes the ligand recognized by the CAR polypeptide, wherein binding of the ligand to the extracellular ligand-binding domain of the CAR polypeptide activates the cell expressing the CAR polypeptide to antagonize or kill the target cell. In some embodiments, the target cell is a cancer cell. In some embodiments, the target cell is a cell correlated to a disease or disorder, such as proliferative diseases (e.g., cancers), hematological malignancies, solid tumors, autoimmune diseases, inflammations, allergic diseases, infections, senescence/aging, etc. In some embodiments, the cell is a regulatory T cell (Treg).

[0049] In another aspect, provided herein is a method of treating a subject having a disease or disorder, including administering to the subject a pharmaceutically effective amount of cells expressing a CAR polypeptide described herein, wherein a target cell correlated to the disease or disorder in the subject express the ligand on the surface, wherein the binding of the ligand to the extracellular ligand-binding domain of the CAR polypeptide activates the cell expressing the CAR polypeptide to antagonize or kill the target cell. In some embodiments, the target cell is a cancer cell. In some embodiments, the target cell is a cell correlated to a disease or disorder, such as proliferative diseases (e.g., cancers), hematological malignancies, solid tumors, autoimmune diseases, inflammations, allergic diseases, infections, senescence/aging, etc. In some embodiments, the cell expressing the CAR polypeptide is a regulatory T cell (Treg).

[0050] In another aspect, provided herein is a composition containing at least two CAR polypeptides described herein. In some embodiments, the at least two CAR polypeptides collaborate to transfer signaling from binding to extracellular antigen(s) to activating the intracellular downstream signaling cascade. For example, the at least two CAR polypeptides may bind to different antigens and/or have different intracellular signaling domains. In some embodiments, a cell expressing the at least two CAR polypeptides is activated only when the extracellular ligand-binding domain of each of the at least two CAR polypeptides binds to its specific ligand (e.g., Boolean logic AND gates). Binding of the extracellular ligand-binding domain of one CAR polypeptide, in a CAR combination containing two CAR polypeptides (e.g., an AND gate), to its specific ligand may or may not activate the CAR polypeptide itself. Only binding of both extracellular ligand-binding domains of the two CAR polypeptides to their specific ligands, synergically activates a cell expressing the two CAR polypeptides.

[0051] In another aspect, provided herein is a composition containing
[0052] i) a first chimeric antigen receptor (CAR) polypeptide having:
   [0053] a) a first extracellular ligand-binding domain having a binding affinity for a first ligand;
   [0054] b) a first transmembrane domain; and
   [0055] c) a first intracellular signaling domain,
      and
[0056] ii) a second chimeric antigen receptor (CAR) polypeptide having:
   [0057] a) a second extracellular ligand-binding domain having a binding affinity for a second ligand different from the first ligand;
   [0058] b) a second transmembrane domain; and
   [0059] c) a second intracellular signaling domain,
[0060] wherein a cell expressing both CAR polypeptides is activated only when the first extracellular ligand-binding domain binds to the first ligand and the second extracellular ligand-binding domain binds to the second ligand, and
[0061] wherein neither of the first and the second intracellular signaling domain has an ITAM, such as CD3zeta.

[0062] Non-limiting exemplary embodiments of the disclosed composition of chimeric antigen receptor (CAR) polypeptides of the disclosure include one or more of the following features. In some embodiments, at least one of the first and the second intracellular signaling domains has a full-length or biologically active fragment of a protein kinase, a G protein, a GTP-binding protein, an adaptor signaling protein, or a scaffold protein capable of inducing cell activation. In some embodiments, neither of the first and the second intracellular signaling domain is a CD3ζ domain. In some embodiments, at least one of the first and the second intracellular signaling domains is selected from the group consisting of: LAT, SLP-76, CD28, CD2, 4-1BB, CD6, and a biologically active fragment, mutant or variant thereof. In some embodiments, at least one of the first and the second intracellular signaling domains is LAT or SLP-76, or a biologically active fragment, mutant or variant thereof. In some embodiments, the first intracellular signaling domain is LAT or a biologically active fragment, mutant or variant thereof, and the second intracellular signaling domain is SLP-76 or a biologically active fragment, mutant or variant thereof. In some embodiments, the first intracellular signaling domain is LAT or a biologically active fragment, mutant or variant thereof, and the second intracellular signaling domain is CD28 or a biologically active fragment, mutant or variant thereof. In some embodiments, the biologically active fragment, mutant, or variant thereof is a mutant of LAT, SLP-76, CD28, CD2, 4-1BB, or CD6, wherein the mutant has at least one mutation or deletion to the corresponding wild-type sequence. In some embodiments, the at least one mutation
[0063] i) enhances the potency of the composition;
[0064] ii) reduces the background activation levels of the cell when only one of the first and the second intracellular signaling domains is activated;
[0065] iii) reduces aggregation of the first and the second CAR polypeptides in absence of the ligand;
[0066] iv) reduces ubiquitination and/or degradation of the first and/or the second CAR polypeptides; and/or
[0067] v) reduces the ability of at least one of the CAR polypeptides to bind to GADS and/or GRB2. In some embodiments, the at least one mutation contains
[0068] i) a mutation of G160D, Y200F, Y220F, Y252F, Y200F/Y220F, or Y200F/Y220F/Y252F, a deletion of amino acid residues at the C terminus (e.g., positions 200-262), a deletion of amino acid residues at positions 28-90, a deletion of amino acid residues at positions 28-130, deletions of amino acid residues at positions 28-90 and at positions 200-262, or deletions of amino acid residues at positions 28-130 and at positions 200-262, corresponding to the wild-type LAT sequence;
[0069] ii) a mutation of K30R, a deletion of amino acid residues (e.g., positions 224-244), a deletion of amino acid residues at positions 1-81, a deletion of amino acid residues at positions 224-265, a deletion of amino acid residues at positions 224-300, or deletions of amino acid residues at positions 1-81 and at positions 224-244, 224-265, or 224-300, corresponding to the wild-type SLP-76 sequence; and/or
[0070] iii) at least one mutation in a region on the first and/or the second CAR polypeptide (or each of the CAR polypeptides in an “AND” gate combination) capable of binding to GADS and/or GRB2.

[0071] In some embodiments, at least one of the first and the second intracellular signaling domains described herein has an amino acid sequence having at least 20%, 25%, 30%, 35%, 40%, 45%, 50%, 55%, 60%, 65%, 70%, 75%, 80%, 85%, 90%, 95%, 99%, or more identity to any one of SEQ ID NOs: 11-26, 103-110, 163, 165, 167, 169, 177, 179, 185, 188, 191, 193, and 195. In some embodiments, at least one of the first and the second intracellular signaling domains has an amino acid sequence having at least 50%, 60%, 70%, 75%, 80%, 90%, 95%, 99%, or more identity to any one of SEQ ID NOs: 11-26, 103-110, 163, 165, 167, 169, 177, 179, 185, 188, 191, 193, and 195. In some embodiments, at least one of the first and the second intracellular signaling domains has an amino acid sequence of any one of SEQ ID NOs: 11-26, 103-110, 163, 165, 167, 169, 177, 179, 185, 188, 191, 193, and 195. In some embodiments, at least one of the first and the second intracellular signaling domains consists of an amino acid sequence of any one of SEQ ID NOs: 11-26, 103-110, 163, 165, 167, 169, 177, 179, 185, 188, 191, 193, and 195.

[0072] In some embodiments, at least one of the first and the second extracellular ligand-binding domains is a ligand-binding domain of an antibody, an antigen-binding fragment, an antibody mimetic, a receptor, a peptide specifically binding to a ligand or antigen, or a ligand for a targeted receptor. In some embodiments, the antibody or the antigen-binding fragment is selected from the group consisting of a monoclonal antibody, an antigen-binding fragment (Fab), a nanobody, a diabody, a triabody, a minibody, an F(ab′)₂ fragment, an F(ab)v fragment, a single chain variable fragment (scFv), a single domain antibody (sdAb), a VH domain, a VL domain, an Fv fragment, a VNAR domain, and a VHH domain. In some embodiments, the antibody mimetic is selected from the group consisting of: Affibody molecules, Affilins, Affimers, Alphabodies, Avimers, DARPins, Fynomers, Kunitz domain peptides, Monobodies, nanoCLAMPs, and a biologically active fragment thereof. In some embodiments, the receptor described herein is NKG2D, or a biologically active fragment thereof. In some embodiments, the ligand for a targeted receptor is an IL-13 polypeptide, an IL-13 mutein, chlorotoxin, or a biologically active fragment thereof. In some embodiments, at least one of the first and the second extracellular ligand-binding domains is multivalent (e.g., bivalent). In some embodiments, at least one of the first and the second extracellular ligand-binding domains is multispecific (e.g., bispecific).

[0073] In some embodiments, at least one of the first and the second ligands (or antigens) localizes on the surface of a target cell. In some embodiments, the target cell is a cell correlated to a disease or disorder, such as proliferative diseases (e.g., cancers), hematological malignancies, solid tumors, autoimmune diseases, inflammations, allergic diseases, infections, senescence/aging, etc. In some embodiments, the cell is a cancer cell. In some embodiments, at least one of the first and the second ligands (or antigens) is an adaptor molecule. In some embodiments, the adaptor is specifically recognized by a target cell described herein (e.g., a cancer cell). Non-limiting examples of suitable types for at least one of the first and the second ligands include cell surface receptors, adhesion proteins, carbohydrates, lipids, glycolipids, lipoproteins, and lipopolysaccharides that are surface-bound, integrins, mucins, and lectins. In some embodiments, at least one of the first and the second ligands (or antigens) is a protein. In some embodiments, at least one of the first and the second ligands (or antigens) is a carbohydrate. In some embodiments, at least one of the first and the second ligands (or antigens) is selected from the group consisting of: CD19, HER2, ROR1, B7-H3 (CD276), influenza hemagglutinin (HA), CD22, CD2, CD5, CD6, 4-1BB, FcγR1, and integrins. In some embodiments, at least one of the first and the second ligands (or antigens) is selected from the group consisting of: CD1a, CD1b, CD1c, CD2, CD3, CD4, CD5, CD6, CD7, CD8, CD9, CD10, CD11a, CD11b, CD11c, CD12, CD13, CD14, CD15 (SSEA-1), CD16 (FcγRIII), CD17, CD18, CD19, CD20, CD21, CD22, CD23, CD24, CD25, CD26, CD27, CD28, CD29, CD30, CD31, CD32 (FcγRII), CD33, CD34, CD35, CD36, CD37, CD38, CD39, CD40, CD41, CD43, CD44, CD44V6, CD45, CD45R/B220, CD45RO, CD49b, CD49d, CD49f, CD52, CD53, CD54, CD56 (NCAM), CD57, CD61 (integrin β3), CD62L, CD63, CD64, CD66b, CD68, CD69, CD70, CD73, CD74, CD79a (Igα), CD79b (Igβ), CD80, CD83, CD85k (ILT3), CD86, CD88, CD93 (C1Rqp), CD94, CD95, CD99, CD103, CD105 (Endoglin), CD107a, CD107b, CD114 (G-CSFR), CD115, CD117, CD122, CD123, CD129, CD133, CD134, CD138 (Syndecan-1), CD141, CD146, CD152 (CTLA-4), CD158 (Kir), CD161 (NK-1.1), CD163, CD183, CD191, CD193 (CCR3), CD194 (CCR4), CD195 (CCR5), CD197 (CCR7), CD203c, CD205 (DEC-205), CD207 (Langerin), CD209 (DC-SIGN), CD223, CD235, CD244 (2B4), CD252 (OX40L), CD267, CD268 (BAFF-R), CD273 (B7-DC, PD-L2), CD276 (B7-H3), CD279 (PD1), CD282 (TLR2), CD284 (TLR4), CD294, CD304 (Neuropilin-1), CD305, CD314 (NKG2D), CD319 (CRACC), CD326, CD328 (Siglec-7), CD335 (NKp46), fetal acetylcholine receptor (AChR), ADGRE2, alpha-fetoprotein (AFP), ALK, BCMA, BDCA3, C3AR, Lewis A (CA19.9), carbonic anhydrase IX (CA1X), calretinin, cancer antigen-125 (CA-125), CCR1, CCR4, CDS, carcinoembryonic antigen (CEA), chromogranin, CLEC12A, an antigen of a cytomegalovirus (CMV) infected cell (e.g., a cell surface antigen), CS-1, CSPG4, cytokeratin, desmin, DLK1, DLL3, EGFRvIII (epidermal growth factor variant III), EGFR and isovariants thereof, epithelial cell adhesion molecule (EpCAM), epithelial glycoprotein2 (EGP 2), epithelial glycoprotein-40 (EGP-40), epithelial membrane protein (EMA), ERBB, epithelial tumor antigen (ETA), FAP, folate-binding protein (FBP), FcγR1, FcεRIα, FITC, FLT3, FOLR1, FOLR3, galactin, gangliosides, gross cystic disease fluid protein (GCDFP-15), GD2 (ganglioside G2), GD3, GM2, GM3, glial fibrillary acidic protein (GFAP), gpA33, glycopeptides, Glypican 2 (GPC2), oncofetal antigen (h5T4), influenza hemagglutinin (HA), human epidermal growth factor receptor 2 (Her2/neu), HLA-DR, HM1.24, HMB-45 antigen, HPV E6, HPV E7, ICAM-1, IgG, IgD, IgE, IgM, IL-13-receptor alpha 1, integrins, Integrin B7, Interleukin-13 receptor subunit alpha-2 (IL-13Rα2), Kappa light chain, kinase insert domain receptor (KDR), Lamba light chain, LILRB2, Lewis Y (LeY), LGR5, Ly49, Ly108, L1 cell adhesion molecule (L1-CAM), melanoma-associated antigen (MAGE), melanoma antigen family A 1 (MAGE-A1), protein melan-A (melanoma antigen recognized by T lymphocytes; MART-1), MCSP, c-Met, MICA/B, mesothelin, muscle-specific actin (MSA), Mesothelin (MSLN), the dimeric form of the pyruvate kinase isoenzyme type M2 (tumor M2-PK), Mucin 1 (Muc-1), Mucin 16 (Muc-16), myo-D1, Ned-2, neurofilament, NKCSI, NKG2D, neuron-specific enolase (NSE), NY-ESO, cancer-testis antigen NY-ESO-1, an abnormal p53 protein, PAP (prostatic acid phosphatase), PAMA, P-cadherin, placental alkaline phosphatase, PRAIVIE, prostein, prostate stem cell antigen (PSCA), prostate-specific membrane antigen (PSMA), Ral-B, K-Ras (V-Ki-ras2 Kirsten rat sarcoma viral oncogene), an abnormal ras protein, ROR1, SLAMF7/CS1, receptor tyrosine-protein kinases erb-B2,3,4, sperm protein 17 (Sp17), STEAP1 (six-transmembrane epithelial antigen of the prostate 1), synaptophysin, tumor-associated glycoprotein 72 (TAG-72), TALLA-1, TARP (T cell receptor gamma alternate reading frame protein), TEM-8, human telomerase reverse transcriptase (hTERT), TIM-3, TLR4, TRBC1, TRBC2, Trp-p8, thyroglobulin, thyroid transcription factor-1, TYRP1, tyrosinase, vascular endothelial growth factor R2 (VEGF-R2), Vα24, Wilms tumor protein (WT-1). In some embodiments, activation of both of the first and the second intracellular signaling domains, or binding of both of the first and the second extracellular ligand-binding domains to their specific ligands, promotes repression and/or killing of a target cell (e.g., a cancer cell) expressing the first and the second ligands, as described herein. In some embodiments, the target cell described herein is a cell in a microenvironment of a biological sample. In some embodiments, the target cell is a cell in a microenvironment of a disease or disorder (e.g., cancer). In some embodiments, the target cell is a cell correlated to a disease or disorder, such as proliferative diseases (e.g., cancers), hematological malignancies, solid tumors, autoimmune diseases, inflammations, allergic diseases, infections, senescence/aging, etc. In some embodiments, the target cell is a cancer cell (e.g., a tumor cell, a solid tumor cell, etc.).

[0074] In some embodiments, at least one of the first and the second transmembrane (TM) domains described herein is derived from a transmembrane domain of: CD4, CD8, CD28, PD-1, OX40, 4-1BB, CTLA-4, or CD2. In some embodiments, at least one of the first and the second transmembrane (TM) domains described herein is a transmembrane domain of: CD4, CD8, CD28, PD-1, OX40, 4-1BB, CTLA-4, or CD2. In some embodiments, at least one of the first and the second transmembrane (TM) domains described herein is or is derived from a TMD of CD3D, CD3E, CD3G, CD3zeta, CD8a, CD8b, CD16, CD25, CD27, CD40, CD79A, CD79B, CD80, CD84, CD86, CD95, CD150 (SLAMF1), CD166, CD200R, CD223 (LAG3), CD270 (HVEM), CD272 (BTLA), CD273 (PD-L2), CD274 (PD-L1), CD278 (ICOS), CD300, CD357 (GITR), A2aR, ICAM-1, 2B4, BTLA, DAP10, FcRα, FcRβ, Fyn, GAL9, IL7, IL12, IL15, KIR, KIR2DL4, KIR2DS1, LAG-3, Lck, LAT, LPA5, LRP, NKp30, NKp44, NKp46, NKG2C, NKG2D, NOTCH1, NOTCH2, NOTCH3, NOTCH4, PTCH2, ROR2, Ryk, SLP-76, SIRPα, pTα, T cell receptor polypeptides (e.g., TCRα and TCRβ), TIM3, TRIM, or ZAP70.

[0075] In some embodiments, the first transmembrane domain and the second transmembrane domain are different. In some embodiments, using different transmembrane domains for the first and the second CAR polypeptides reduces background activation levels of the cell when only one of the first and the second intracellular signaling domains is activated. In some embodiments, using different transmembrane domains for the first and the second CAR polypeptides reduces background activation levels of the cell when only one of the first and the second intracellular signaling domains is activated. In some embodiments, the first transmembrane domain and the second transmembrane domain are the same. In some embodiments, the transmembrane domains are mutated to decrease homodimerization or heterodimerization with other CAR receptors on the same cell. In some embodiments, the transmembrane domains are mutated at any Cysteines (e.g., to Alanine or another amino acid) to decrease homodimerization or heterodimerization with other CAR receptors on the same cell. In some embodiments, a pair of the first transmembrane domain and the second transmembrane domain, if different, is selected from the group consisting of: CD4 TM and CD28 TM, CD8 TM and CD28 TM, CD4 TM and CD8 TM, and other combinations of TM domains described herein. In some embodiments, the first CAR polypeptide has a CD4 transmembrane domain and the second CAR polypeptide has a CD8 or CD28 hinge/transmembrane domain. In some embodiments, a pair of the first and the second CAR polypeptides contains a CAR polypeptide having LAT as its intracellular signaling domain and a CAR polypeptide having SLP-76 as its intracellular signaling domain. LAT and/or SLP-76 in these CAR polypeptides may have wild-type sequence(s) or at least one variation (e.g., mutation, deletion, etc.) to the corresponding wild-type sequence(s), as described herein. The LAT CAR and/or the SLP-76 CAR polypeptide(s) may further have at least one additional intracellular signaling domain, as described herein, in the polypeptide(s). The LAT CAR and/or the SLP-76 CAR polypeptide(s) may have at least one ECD, hinge domain, TMD, and/or extracellular spacer domain, as described herein in various sections.

[0076] In some embodiments, at least one of the first and the second CAR polypeptides described herein further contains a hinge domain. In some embodiments, the hinge domain is derived from a hinge domain of CD8, CD28, CD4, IgG (e.g., IgG4), PD-1, CTLA-4, or CD2. In some embodiments, the hinge domain is a hinge domain of CD8, CD28, CD4, IgG (e.g., IgG4), PD-1, CTLA-4, or CD2. In some embodiments, the hinge domain can include regions derived from or being a human CD8α (a.k.a. CD8a), LFA-1 (CD11a/CD18), CD5, CD27 (TNFRSF7), CD70, 4-1BB, OX40 (CD134), ICOS (CD278), IgG1 Fc region, IgG2 Fc region, IgG3 Fc region, IgG4 Fc region, IgE Fc region, IgM Fc region, IgA Fc region, or a combination thereof. In some embodiments, the first and the second CAR polypeptides further have a same hinge domain. In some embodiments, the first and the second CAR polypeptides further have different hinge domains. For example, the first and the second CAR polypeptides may each have a hinge domain, as described herein, which is different from each other, or only one of the first and the second CAR polypeptides further has a hinge domain. In some embodiments, a pair of the hinge domains of the first and the second CAR polypeptides, if different, is selected from the group consisting of: CD8 hinge domain and CD28 hinge domain, CD4 hinge domain and IgG4 hinge domain, CD8 hinge domain and IgG4 hinge domain, and CD28 hinge domain and IgG4 hinge domain. In some embodiments, using different hinge domains for the first and the second CAR polypeptides reduces background activation levels of the cell when only one of the first and the second intracellular signaling domains is activated, or only one of the first and the second extracellular ligand-binding domains binds to its specific ligand. In some embodiments, at least one of the first and the second CAR polypeptides described herein has a mutation in the hinge/transmembrane domain. In some embodiments, the mutation reduces aggregation of the first and the second CAR polypeptides in absence of at least one of the ligands for the first and the second CAR polypeptides. In some embodiments, the hinge domains are mutated to decrease homodimerization or heterodimerization with other CAR receptors on the same cell. In some embodiments, the hinge domains are mutated at any Cysteines (e.g., to Alanine or another amino acid) to decrease homodimerization or heterodimerization with other CAR receptors on the same cell. In some embodiments, a pair of the hinge and transmembrane (H/TM) domains of the first and the second CAR polypeptides, if different, contains at least two H/TM domains as described herein, e.g., in Tables 1-2 and sequence listing.

[0077] In some embodiments, at least one of the first and the second CAR polypeptides described herein further contains a co-stimulatory domain. In some embodiments, the co-stimulatory domain is derived from a co-stimulatory domain of CD28, ICOS, CD27, 4-1BB, OX40, or CD40L. In some embodiments, the co-stimulatory domain is a costimulatory domain of CD28, ICOS, CD27, 4-1BB, OX40, or CD40L. In some embodiments, the costimulatory domain is or is derived from a co-stimulatory domain of CD28, ICOS (CD278), CD27, 4-1BB (CD137), OX40 (CD134), CD2, CD4, CD5, CD7, CD8, CD8α, CD8β, CD11a, CD11b, CD11c, CD11d, CD18, CD19, CD19a, CD29, CD30, CD30L, CD40, CD40L (CD154), CD48, CD49a, CD49D, CD49f, CD58, CD53, ICAM-1 (CD54), CD69, CD70, CD80 (B7-1), CD82, CD83, CD84, CD86 (B7-2), CD90, CD96, CD100, CD103, CD122, CD132, CD150 (SLAMF1), CD160 (BY55), CD162 (DNAM1), CD223 (LAG3), CD226, CD229, CD244, CD270 (HVEM), CD273 (PD-L2), CD274 (PD-L1), CD278, LAT, lymphocyte function-associated antigen-1 (LFA-1), LIGHT, NKG2C, NKG2D, NKp30, NKp44, NKp46, NKp80 (KLRF1), B7-H2, B7-H3, CD83 ligand, PD-1, SLP-76, Toll-like receptors (TLRs, such as TLR2), DAP10, DAP12, LAG-3, 2B4, CARD1, CTLA-4 (CD152), TRIM, ZAP70, FcERIγ, 4-1BBL, BAFF, GADS, GITR, GITR-L, BAFF-R, HVEM, CD27L, OX40L, TAC1, BLAME, CRACC, CD2F-10, NTB-A, integrin α4, integrin α4β1, integrin α4β7, IA4, ICAM-1, IL2Rβ, IL2Rγ, IL7Rα, ITGA4, ITGA6, ITGAD, ITGAE, ITGAL, ITGAM, ITGAX, ITGB1, ITGB2, ITGB7, KIRDS2, LTBR, PAG/Cbp, PSGL1, SLAMF6 (NTB-A, Ly108), SLAMF7, SLP-76, TNFR2, TRANCE/RANKL, VLA1, VLA-6, BTLA, ikaros, LAG-3, LMIR, CEACAM1, CRTAM, TCL1A, DAP12, TIM-1, Dectin-1, PDCD6, PD-1, TIM-4, TSLP, EphB6, TSLP-R, HLA-DR, or any combination thereof. In some embodiments, the first and the second CAR polypeptides further have a same co-stimulatory domain. In some embodiments, the first and the second CAR polypeptides further have different co-stimulatory domains. For example, the first and the second CAR polypeptides may each have a co-stimulatory domain, as described herein, which is different from each other, or only one of the first and the second CAR polypeptides further has a co-stimulatory domain.

[0078] In some embodiments, the composition described herein further has a third CAR polypeptide. In some embodiments, the composition described herein further has a third CAR polypeptide having:
[0079] a) a third extracellular ligand-binding domain having a binding affinity for a third ligand different from the first ligand and the second ligand;
[0080] b) a third transmembrane domain; and
[0081] c) a third intracellular signaling domain,
[0082] wherein a cell expressing all three CAR polypeptides is activated only when the first intracellular signaling domain is activated and at least one of the second and the third intracellular signaling domains is activated, or the first extracellular ligand-binding domain binds to the first ligand and at least one of the second and the third extracellular ligand-binding domains binds to the second and/or the third ligand (an “AND AND/OR” gate).

[0083] In some embodiments, at least one of three CAR polypeptides in a combination (e.g., an “AND AND/OR” gate) has an intracellular signaling domain as described herein, such as ZAP70, PLCG1, PKC, ITK, NCK, VAV1, GRB2, GADS, SOS1, ADAP, SYK, LYN, PI3K, BLNK, or a biologically active fragment, mutant, or variant thereof. In some embodiments, the second and the third intracellular signaling domains are the same.

[0084] In some embodiments, the extracellular ligand-binding domain (a.k.a., extracellular antigen-binding domain) of at least one of three CAR polypeptides in a combination has a ligand-binding domain of an antibody, an antigen-binding fragment, an antibody mimetic, a receptor, a peptide specifically binding to a ligand or antigen, or a ligand for a targeted receptor, as described herein, such as a monoclonal antibody, an antigen-binding fragment (Fab), a nanobody, a diabody, a triabody, a minibody, an F(ab′)₂ fragment, an F(ab)v fragment, a single chain variable fragment (scFv), a single domain antibody (sdAb), a VH domain, a VL domain, an Fv fragment, a VNAR domain, and a VHH domain. In some embodiments, the antibody mimetic is selected from the group consisting of: Affibody molecules, Affilins, Affimers, Alphabodies, Avimers, DARPins, Fynomers, Kunitz domain peptides, Monobodies, nanoCLAMPs, and a biologically active fragment thereof. In some embodiments, the extracellular ligand-binding domain is multivalent (e.g., bivalent). In some embodiments, the extracellular ligand-binding domain is multispecific (e.g., bispecific).

[0085] In some embodiments, the ligand or antigen recognized by the extracellular ligand-binding domain of at least one of three CAR polypeptides in a combination localizes on the surface of a target cell. In some embodiments, such ligand or antigen is an adaptor molecule. In some embodiments, the adaptor is specifically recognized by a target cell (e.g., a cancer cell). Non-limiting examples of suitable ligand types include cell surface receptors, adhesion proteins, carbohydrates, lipids, glycolipids, lipoproteins, and lipopolysaccharides that are surface-bound, integrins, mucins, and lectins. In some embodiments, the ligand is a protein. In some embodiments, the ligand is a carbohydrate. In some embodiments, the ligand is at least one selected from the group consisting of: CD19, HER2, ROR1, B7-H3 (CD276), influenza hemagglutinin (HA), CD22, IL13Ra2, CD2, CD5, CD6, FcγR1, integrins, gangliosides, and glycopeptides. In some embodiments, the ligand is at least one selected from the group consisting of: CD1a, CD1b, CD1c, CD2, CD3, CD4, CD5, CD6, CD7, CD8, CD9, CD10, CD11a, CD11b, CD11c, CD12, CD13, CD14, CD15 (SSEA-1), CD16 (FcγRIII), CD17, CD18, CD19, CD20, CD21, CD22, CD23, CD24, CD25, CD26, CD27, CD28, CD29, CD30, CD31, CD32 (FcγRII), CD33, CD34, CD35, CD36, CD37, CD38, CD39, CD40, CD41, CD43, CD44, CD44V6, CD45, CD45R/B220, CD45RO, CD49b, CD49d, CD49f, CD52, CD53, CD54, CD56 (NCAM), CD57, CD61 (integrin β3), CD62L, CD63, CD64, CD66b, CD68, CD69, CD70, CD73, CD74, CD79a (Igα), CD79b (Igβ), CD80, CD83, CD85k (ILT3), CD86, CD88, CD93 (C1Rqp), CD94, CD95, CD99, CD103, CD105 (Endoglin), CD107a, CD107b, CD114 (G-CSFR), CD115, CD117, CD122, CD123, CD129, CD133, CD134, CD138 (Syndecan-1), CD141, CD146, CD152 (CTLA-4), CD158 (Kir), CD161 (NK-1.1), CD163, CD183, CD191, CD193 (CCR3), CD194 (CCR4), CD195 (CCR5), CD197 (CCR7), CD203c, CD205 (DEC-205), CD207 (Langerin), CD209 (DC-SIGN), CD223, CD235, CD244 (2B4), CD252 (OX40L), CD267, CD268 (BAFF-R), CD273 (B7-DC, PD-L2), CD276 (B7-H3), CD279 (PD1), CD282 (TLR2), CD284 (TLR4), CD294, CD304 (Neuropilin-1), CD305, CD314 (NKG2D), CD319 (CRACC), CD326, CD328 (Siglec-7), CD335 (NKp46), fetal acetylcholine receptor (AChR), ADGRE2, alpha-fetoprotein (AFP), ALK, BCMA, BDCA3, C3AR, Lewis A (CA19.9), carbonic anhydrase IX (CA1X), calretinin, cancer antigen-125 (CA-125), CCR1, CCR4, CDS, carcinoembryonic antigen (CEA), chromogranin, CLEC12A, an antigen of a cytomegalovirus (CMV) infected cell (e.g., a cell surface antigen), CS-1, CSPG4, cytokeratin, desmin, DLK1, DLL3, EGFRvIII (epidermal growth factor variant III), EGFR and isovariants thereof, epithelial cell adhesion molecule (EpCAM), epithelial glycoprotein2 (EGP 2), epithelial glycoprotein-40 (EGP-40), epithelial membrane protein (EMA), ERBB, epithelial tumor antigen (ETA), FAP, folate-binding protein (FBP), FcγR1, FcεRIα, FITC, FLT3, FOLR1, FOLR3, galactin, ganlgiosides, gross cystic disease fluid protein (GCDFP-15), GD2 (ganglioside G2), GD3, GM2, GM3, glial fibrillary acidic protein (GFAP), gpA33, glycopeptides, Glypican 2 (GPC2), oncofetal antigen (h5T4), influenza hemagglutinin (HA), human epidermal growth factor receptor 2 (Her2/neu), HLA-DR, HM1.24, HMB-45 antigen, HPV E6, HPV E7, ICAM-1, IgG, IgD, IgE, IgM, IL-13-receptor alpha 1, integrins, Integrin B7, Interleukin-13 receptor subunit alpha-2 (IL-13Rα2), Kappa light chain, kinase insert domain receptor (KDR), Lamba light chain, LILRB2, Lewis Y (LeY), LGR5, Ly49, Ly108, L1 cell adhesion molecule (L1-CAM), melanoma-associated antigen (MAGE), melanoma antigen family A 1 (MAGE-A1), protein melan-A (melanoma antigen recognized by T lymphocytes; MART-1), MCSP, c-Met, MICA/B, mesothelin, muscle-specific actin (MSA), Mesothelin (MSLN), the dimeric form of the pyruvate kinase isoenzyme type M2 (tumor M2-PK), Mucin 1 (Muc-1), Mucin 16 (Muc-16), myo-D1, Necl-2, neurofilament, NKCSI, NKG2D, neuron-specific enolase (NSE), NY-ESO, cancer-testis antigen NY-ESO-1, an abnormal p53 protein, PAP (prostatic acid phosphatase), PAMA, P-cadherin, placental alkaline phosphatase, PRAIVIE, prostein, prostate stem cell antigen (PSCA), prostate-specific membrane antigen (PSMA), Ral-B, K-Ras (V-Ki-ras2 Kirsten rat sarcoma viral oncogene), an abnormal ras protein, ROR1, SLAMF7/CS1, receptor tyrosine-protein kinases erb-B2,3,4, sperm protein 17 (Sp17), STEAP1 (six-transmembrane epithelial antigen of the prostate 1), synaptophysin, tumor-associated glycoprotein 72 (TAG-72), TALLA-1, TARP (T cell receptor gamma alternate reading frame protein), TEM-8, human telomerase reverse transcriptase (hTERT), TIM-3, TLR4, TRBC1, TRBC2, Trp-p8, thyroglobulin, thyroid transcription factor-1, TYRP1, tyrosinase, vascular endothelial growth factor R2 (VEGF-R2), Vα24, Wilms tumor protein (WT-1), and various pathogen antigen known in the art.

[0086] In some embodiments, the transmembrane (TM) domain of at least one of three CAR polypeptides in a combination is derived from a transmembrane domain described herein, such as a TMD of CD4, CD8, CD28, PD-1, OX40, 4-1BB, CTLA-4, or CD2. In some embodiments, the transmembrane (TM) domain described herein has a transmembrane domain of CD4, CD8, or CD28.

[0087] In some embodiments, at least one of three CAR polypeptides in a combination as described herein further has a hinge domain. In some embodiments, the hinge domain is derived from a hinge domain of CD8, CD28, CD4, IgG (e.g., IgG4), PD-1, CTLA-4, or CD2. In some embodiments, the hinge domain is a hinge domain of CD8, CD28, CD4, or IgG (e.g., IgG4).

[0088] In some embodiments, at least one of three CAR polypeptides in a combination described herein further has a costimulatory domain. In some embodiments, the co-stimulatory domain is derived from a co-stimulatory domain of CD28, ICOS (CD278), CD27, 4-1BB (CD137), OX40 (CD134), CD2, CD4, CD5, CD7, CD8, CD8α, CD8β, CD11a, CD11b, CD11c, CD11d, CD18, CD19, CD19a, CD29, CD30, CD30L, CD40, CD40L (CD154), CD48, CD49a, CD49D, CD49f, CD58, CD53, ICAM-1 (CD54), CD69, CD70, CD80 (B7-1), CD82, CD83, CD84, CD86 (B7-2), CD90, CD96, CD100, CD103, CD122, CD132, CD150 (SLAMF1), CD160 (BY55), CD162 (DNAM1), CD223 (LAG3), CD226, CD229, CD244, CD270 (HVEM), CD273 (PD-L2), CD274 (PD-L1), CD278, LAT, lymphocyte function-associated antigen-1 (LFA-1), LIGHT, NKG2C, NKG2D, NKp30, NKp44, NKp46, NKp80 (KLRF1), B7-H2, B7-H3, CD83 ligand, PD-1, SLP-76, Toll-like receptors (TLRs, such as TLR2), DAP10, DAP12, LAG-3, 2B4, CARD1, CTLA-4 (CD152), TRIM, ZAP70, FcERIγ, 4-1BBL, BAFF, GADS, GITR, GITR-L, BAFF-R, HVEM, CD27L, OX40L, TAC1, BLAME, CRACC, CD2F-10, NTB-A, integrin α4, integrin α4β1, integrin α4β7, IA4, ICAM-1, IL2Rβ, IL2Rγ, IL7Rα, ITGA4, ITGA6, ITGAD, ITGAE, ITGAL, ITGAM, ITGAX, ITGB1, ITGB2, ITGB7, KIRDS2, LTBR, PAG/Cbp, PSGL1, SLAMF6 (NTB-A, Ly108), SLAMF7, SLP-76, TNFR2, TRANCE/RANKL, VLA1, VLA-6, BTLA, ikaros, LAG-3, LMIR, CEACAM1, CRTAM, TCL1A, DAP12, TIM-1, Dectin-1, PDCD6, PD-1, TIM-4, TSLP, EphB6, TSLP-R, HLA-DR, or any combination thereof. In some embodiments, the co-stimulatory domain is a co-stimulatory domain of CD28, ICOS, CD27, 4-1BB, OX40, or CD40L.

[0089] In some embodiments, at least one of three CAR polypeptides in a combination further has at least one mutation from a wild-type (e.g., naturally occurring) sequence in at least one of domains described herein. In some embodiments, of the at least one mutation is selected from the mutations listed in the below section titled “Mutations to chimeric antigen receptors (CARs)”.

[0090] In some embodiments, at least one of CAR polypeptides in the composition described herein has an amino acid sequence having at least 20%, 25%, 30%, 35%, 40%, 45%, 50%, 55%, 60%, 65%, 70%, 75%, 80%, 85%, 90%, 95%, 99%, or more identity to any one of SEQ ID NOs: 27-49, 111-123, 148-151, 162, 164, 166, 168, 170-176, 178, 180-184, 186, 187, 189, 190, 192, 194, 196, and 198-204. In some embodiments, at least one of CAR polypeptides in the composition described herein has an amino acid sequence having at least 50%, 60%, 70%, 75%, 80%, 90%, 95%, 99%, or more identity to any one of SEQ ID NOs: 27-49, 111-123, 148-151, 162, 164, 166, 168, 170-176, 178, 180-184, 186, 187, 189, 190, 192, 194, 196, and 198-204. In some embodiments, at least one of CAR polypeptides in the composition described herein has an amino acid sequence of any one of SEQ ID NOs: 27-49, 111-123, 148-151, 162, 164, 166, 168, 170-176, 178, 180-184, 186, 187, 189, 190, 192, 194, 196, and 198-204. In some embodiments, at least one of CAR polypeptides in the composition described herein consists of an amino acid sequence of any one of SEQ ID NOs: 27-49, 111-123, 148-151, 162, 164, 166, 168, 170-176, 178, 180-184, 186, 187, 189, 190, 192, 194, 196, and 198-204.

[0091] In some embodiments, the composition described herein is capable of activating a target cell expressing the first and the second CAR polypeptides. In some embodiments, the target cell is an immune cell. In some embodiments, the immune cell is a T cell, a regulatory T cell (Treg), a natural killer (NK) cell, a macrophage, a monocyte, a stem cell, a gamma delta T cell, a natural killer T (NKT) cell, or an induced pluripotent stem cell (iPSC)-derived T cell. In some embodiments, the target cell is a non-immune cell.

[0092] In some embodiments, the composition described herein is capable of reducing T cell exhaustion. For example, T cell exhaustion may be reduced to 90%, 80%, 70%, 60%, 50%, 40%, 30%, 20%, 10%, 5%, 1%, or less than a control T cell not treated with the composition or not expressing both of the first and the second CAR polypeptides in the composition, or a control T cell expressing a CAR molecule containing CD3zeta. The levels of T cell exhaustion may be represented by any methods known in the art, such as the levels of cytokine production by the T cell and/or the cytotoxicity of the T cell. In some embodiments, reducing T cell exhaustion by the composition described herein results in an increase of cytokine production by the T cell and/or the cytotoxicity of the T cell, and/or a prolonged timeframe for the T cell to maintain certain levels of cytokine production and/or cytotoxicity.

[0093] In another aspect, some embodiments of the disclosure provide a composition containing a first polynucleotide molecule and a second polynucleotide molecule. In some embodiments, the first polynucleotide molecule encodes the first chimeric antigen receptor (CAR) polypeptide in the composition described herein, and the second polynucleotide molecule encodes the second chimeric antigen receptor (CAR) polypeptide in the composition described herein. In some embodiments, the first and the second polynucleotide molecules are conjugated together. In some embodiments, the first and the second polynucleotide molecules are different parts on a same polynucleotide.

[0094] In another aspect, some embodiments of the disclosure provide a composition containing a first polynucleotide molecule, a second polynucleotide molecule, and a third polynucleotide molecule. In some embodiments, a first polynucleotide molecule encodes a first chimeric antigen receptor (CAR) polypeptide in the composition described herein, a second polynucleotide molecule encodes a second chimeric antigen receptor (CAR) polypeptide in the composition described herein, and a third polynucleotide molecule encodes a third chimeric antigen receptor (CAR) polypeptide in the composition described herein. In some embodiments, the first, the second and the third polynucleotide molecules are conjugated together. In some embodiments, the first, the second and the third polynucleotide molecules are different parts on a same polynucleotide.

[0095] In another aspect, some embodiments of the disclosure provide a first expression vector and a second expression vector, wherein the first expression vector has the first polynucleotide molecule and the second expression vector has the second polynucleotide molecule. In another aspect, some embodiments of the disclosure provide a first expression vector, a second expression vector and a third expression vector, wherein the first expression vector has the first polynucleotide molecule, the second expression vector has the second polynucleotide molecule and the third expression vector has the third polynucleotide molecule.

[0096] In another aspect, some embodiments of the disclosure provide a cell expressing the composition described herein. In some embodiments, the cell is an immune cell. In some embodiments, the immune cell is a T cell, a regulatory T cell (Treg), a natural killer (NK) cell, a macrophage, a monocyte, a stem cell, a natural killer T (NKT) cell, a gamma delta T cell, an induced pluripotent stem cell (iPSC)-derived NK cell, or an induced pluripotent stem cell (iPSC)-derived T cell. In some embodiments, the cell is a non-immune cell.

[0097] In another aspect, provided herein is a pharmaceutical composition including the composition containing the first and the second CAR polypeptides described herein, a composition containing the first polynucleotide encoding the first CAR polypeptide and the second polynucleotide encoding the second CAR polypeptide, an expression vector, a cell, and/or a composition as described herein, plus a pharmaceutically acceptable carrier. In some embodiments, the cell is a regulatory T cell (Treg).

[0098] In another aspect, provided herein is a method of preparing or producing the first and the second CAR polypeptides in the composition described herein. For example, the method may include introducing a composition containing the first and the second polynucleotides or an expression vector described herein into a cultured cell and inducing expression of the CAR polypeptide under a condition. In some embodiments, the cultured cell is a regulatory T cell (Treg).

[0099] In another aspect, provided herein is a method for selectively activating a cell including contacting the cell with first ligand and a second ligand, wherein the cell expresses a composition containing a first and a second CAR polypeptides described herein, wherein binding of the first and the second ligands to the first and the second extracellular ligand-binding domains activates the first and the second intracellular signaling domains, respectively, thereby activating the cell, wherein activation of only one of the first and the second intracellular signaling domains does not activate the cell. In some embodiments, the cell is a regulatory T cell (Treg).

[0100] In another aspect, provided herein is a method of antagonizing or killing a target cell including contacting the target cell with a cell expressing a composition containing a first and a second CAR polypeptides described herein, wherein the target cell expresses or specifically recognizes both the first ligand and the second ligand, wherein binding of the first ligand to the first extracellular ligand-binding domain and binding of the second ligand to the second extracellular ligand-binding domain activate the cell expressing the composition to antagonize or kill the target cell. In some embodiments, the target cell is correlated to a disease or disorder. Exemplary diseases or disorders may include, e.g., proliferative diseases (e.g., cancers), hematological malignancies, solid tumors, autoimmune diseases, inflammations, allergic diseases, infections, senescence/aging, etc. In some embodiments, the cell expressing the composition is a regulatory T cell (Treg).

[0101] In another aspect, provided herein is a method of treating a subject having a disease or disorder, including administering to the subject a pharmaceutically effective amount of cells expressing a first and a second CAR polypeptides in a composition described herein, wherein a target cell correlated to the disease or disorder in the subject expresses or specifically recognizes both the first ligand and the second ligand, wherein the binding of the first ligand to the first extracellular ligand-binding domain and binding of the second ligand to the second extracellular ligand-binding domain activate the cells expressing the composition to antagonize or kill the target cells. Exemplary diseases or disorders may include, e.g., proliferative diseases (e.g., cancers), hematological malignancies, solid tumors, autoimmune diseases, inflammations, allergic diseases, infections, senescence/aging, etc. In some embodiments, the cell expressing the composition is a regulatory T cell (Treg).

[0102] In another aspect, some embodiments of the disclosure provide various kits for the practice of the methods disclosed herein. Some embodiments relate to kits for methods of the diagnosis, prevention, and/or treatment of a condition in a subject in need thereof, wherein the kits include one or more of: a CAR polypeptide of the disclosure; a recombinant nucleic acid of the disclosure; a recombinant cell of the disclosure, and a pharmaceutical composition of the disclosure.

[0103] In another aspect, provided herein is the use of one or more of: a CAR polypeptide of the disclosure, a composition of a first and a second CAR polypeptides (or polynucleotides encoding such polypeptides) of the disclosure, a recombinant nucleic acid of the disclosure, a recombinant cell of the disclosure, and a pharmaceutical composition, for the diagnosis, prevention, and/or treatment of a condition. Exemplary conditions may include, e.g., proliferative diseases (e.g., cancers), hematological malignancies, solid tumors, autoimmune diseases, inflammations, allergic diseases, infections, senescence/aging, etc. In some embodiments, the condition is a proliferative disease. In some embodiments, the proliferative disease is a cancer.

[0104] In another aspect, provided herein is the use of one or more of the following: a CAR polypeptide of the disclosure, a composition of a first and a second CAR polypeptides (or polynucleotides encoding such polypeptides) of the disclosure, a recombinant nucleic acid of the disclosure, a recombinant cell of the disclosure, or a pharmaceutical composition of the disclosure, in the manufacture of a medicament for the prevention and/or treatment of a health condition. Exemplary conditions may include, e.g., proliferative diseases (e.g., cancers), hematological malignancies, solid tumors, autoimmune diseases, inflammations, allergic diseases, infections, senescence/aging, etc. In some embodiments, the condition is a proliferative disease. In some embodiments, the proliferative disease is a cancer.

[0105] In some embodiments, the cell expressing the CAR construct(s) described herein, useful for preparing a composition, or for use in the method described herein, is a regulatory T cell (Treg).

[0106] The foregoing summary is illustrative only and is not intended to be in any way limiting. In addition to the illustrative embodiments and features described herein, further aspects, embodiments, objects and features of the disclosure can become fully apparent from the drawings and the detailed description and the claims.

[0107] Each of the aspects and embodiments described herein are capable of being used together, unless excluded either explicitly or clearly from the context of the embodiment or aspect.

[0108] Throughout this specification, various patents, patent applications and other types of publications (e.g., journal articles, electronic database entries, etc.) are referenced. The disclosure of all patents, patent applications, and other publications cited herein are hereby incorporated by reference in their entirety for all purposes.

### BRIEF DESCRIPTION OF THE DRAWINGS

[0109] FIG. 1 shows histograms of FACS analyses for expressions of CD19-targeting CAR constructs containing various downstream TCR pathway signaling molecules.

[0110] FIG. 2 shows a graph illustrating lack of interleukin-2 (IL-2) generation by most (LCK, FYN, SLP-76, and LAT) TCR signaling molecule constructs in response to antigen exposure.

[0111] FIG. 3 shows histograms of FACS analyses for expressions of HER2-targeting CAR constructs containing either a full-length ZAP70 or ZAP70 fragments, demonstrating that only a fragment containing segments from both the interdomain B domain and the kinase domain from ZAP70 (i.e., ZAP70²⁵⁵⁻⁶⁰⁰), but not a full-length ZAP70 or a fragment containing only the kinase domain from ZAP70 (i.e., ZAP70^{kinase}), will express in the HER2-targeting CAR construct in the cell.

[0112] FIG. 4 shows a graph illustrating cell activation (detected by interleukin-2 (IL-2) generation) by CAR constructs containing either ZAP70 (“ZAP70²⁵⁵⁻⁶⁰⁰”) or PLC-gamma (“PLCG1”) signaling molecules, but not by CAR constructs containing other proximal signaling molecules, in response to antigen (i.e., CD19 expressed on CD19+HER2+ tumor cells) exposure. For each condition, tested constructs contain, from left to right, LAT, SLP-76, LcK, Fyn, ZAP70²⁵⁵⁻⁶⁰⁰, PLCG1, and mock as control.

[0113] FIGS. 5A-5C show several graphs comparing cell activation by different CAR molecules, including CAR molecules containing a truncated-ZAP70 fragment (ZAP70²⁵⁵⁻⁶⁰⁰) as the cytosolic signaling domain, recognizing HER2 (FIG. 5A), B7-H3 (FIG. 5B), or GD2 (FIG. 5C), and traditional CAR molecules containing either CD28-zeta (CD28ζ) or 4-1BB-zeta (4-1BBζ) as the cytosolic signaling domain. The left panel of FIG. 5A shows cytotoxicity index for a HER2-expressing Nalm6 leukemia tumor cell line mixed with T cells expressing these CAR molecules. The right panel of FIG. 5A is a bar chart comparing IL-2 production by T cells expressing these CAR molecules (containing, from left to right in each condition, CD28ζ, 4-1BBζ, or ZAP70²⁵⁵⁻⁶⁰⁰) when exposing to the HER2-expression Nalm6 tumor cell line. FIGS. 5B-5C show in vitro functionality of GD2/B7-H3-targeting CAR T cells bearing CARs with either the 4-1BB-zeta or the ZAP-70²⁵⁵⁻⁶⁰⁰ fragment endodomains. FIG. 5B shows cytokine production by B7-H3-targeting 4-1BB-zeta or ZAP-70²⁵⁵⁻⁶⁰⁰ fragment CAR T cells when co-cultured with tumor cells (left panel) and killing of CHLA-255 neuroblastoma cells by said CAR T cells (right panel). FIG. 5C shows cytokine production (left panel) and killing of neuroblastoma cells (CHLA-255) (right panel) by CAR T cells expressing GD2-targeting 4-1BB-zeta or ZAP-70²⁵⁵⁻⁶⁰⁰ fragment, when co-cultured with tumor cells.

[0114] FIGS. 6A-6B show graphs illustrating the expression and function of exemplary CAR constructs containing PLCG1. FIG. 6A shows a cartoon representation of a HER2−28H/TM-PLCG1 CAR construct (top) and graphs illustrating the expression of this construct in T cells (the histogram in the left panel at the bottom), the cytotoxicity of the T cells expressing the HER2−28H/TM-PLCG1 CAR against HER2-expressing tumor cells (bottom, the middle panel), and cytokine (IL-2) generation (bottom, the right panel) by the T cells, demonstrating an activity of this CAR to recognize and kill target cells and to produce cytokine in response to antigen exposure. A similar CAR construct containing PLCG1 and anti-CD19 scFv was prepared and tested, as shown in FIG. 6B, in which the top panel shows the expression of such CAR construct in T cells and the bottom panels show the capacity to induce IL-2 cytokine production upon stimulation with Nalm6 cells [bottom left; the y-axis represents the levels of IL-2 (pg/ml)] and the cytotoxicity (by measuring killing of Nalm6 tumor cells at 2:1 effector:target ratio; bottom right) of such CAR construct expressed on T cells.

[0115] FIGS. 7A-7C show an abbreviated depiction of the T cell proximal signaling cascade. FIG. 7A shows that LCK is responsible for phosphorylation of CD3zeta. FIG. 7B shows that ZAP70 docks on phosphorylated CD3zeta and is activated to phosphorylate SLP-76 and LAT. FIG. 7C shows that, once phosphorylated, SLP-76 and LAT come together to form a scaffold for activation of PLCG1, which propagates many downstream effector functions, such as T cell activation.

[0116] FIGS. 8A-8B show that a T cell expressing both SLP-76 and LAT CARs, which have different antigen specificities (i.e., Antigen A and Antigen B, respectively), generates a robust response to tumor cells expressing both target antigens. FIG. 8A shows a depiction of the CAR receptor structures. FIG. 8B shows a bar graph comparing the amount of IL-2 produced by T cells expressing either the LAT or SLP-76 CAR construct alone or in combination (“LAT+SLP-76”), when exposed to tumor cells expressing both antigens for the LAT and the SLP-76 CAR constructs.

[0117] FIG. 9 shows FACS data for cells expressing several different combinations of signaling molecule CAR constructs. As shown in FIG. 2, each of the constructs alone does not promote IL-2 generation in response to antigen exposure.

[0118] FIG. 10 is a bar graph comparing the amount of IL-2 produced by T cells expressing different combinations of CAR molecules as in FIG. 9, when exposed to both antigens for the CAR molecules in combinations.

[0119] FIG. 11 shows that LAT and SLP-76 CARs function as an AND-gate to induce T cell activation (i.e., activating cells only when both antigen A and antigen B are engaged) (left). Also shown are cartoon representations of the LAT and SLP-76 CAR constructs (right).

[0120] FIG. 12 shows graphs comparing the activity of T cells expressing both LAT and SLP-76 CARs against tumor lines expressing different antigens. In the left panel, a bar graph compares the IL-2 expression levels for T cells expressing both a CD19−CD28H/TM-LAT CAR molecule and a HER2−CD28H/TM-SLP-76 molecule and being exposed to tumor cell lines expressing only CD19 (“CD19+HER2−”), only HER2 (“CD19−HER2+”), or both CD19 and HER2 (“CD19+HER2+”) antigens. Histograms of FACS data are used to confirm the expression of the CAR molecules (the middle panel and the right-side upper and bottom panels).

[0121] FIG. 13 shows graphs comparing the IL-2 generation activity of T cells expressing both LAT and SLP-76 CARs when exposed to tumor cell lines expressing different antigens, illustrating that when a LAT CAR and a SLP-76 CAR share a same hinge/transmembrane domain, the system had some background activity against single antigen positive cells. The upper panel shows FACS data for exemplary T cells expressing LAT and SLP-76 CAR molecules with a same CD8 or CD28 hinge/transmembrane domain. The bottom panel is a bar graph comparing IL-2 production of the exemplary T cells exposed to tumor cells expressing no antigen (“CD19−HER2−”), CD19 antigen only (“CD19+HER2−”), HER2 antigen only (“CD19−HER2+”), or both antigens (“CD19+HER2+”). The exemplary T cells had some background activation in response to a single antigen of either CD19 or HER2, which was less than the activation when both antigens were present (“CD19+ER2+”) (the bottom panel).

[0122] FIG. 14 is a set of graphs showing expression of several LAT and SLP-76 CAR construct combinations with shared or alternate hinge-transmembrane domains between the constructs on primary human T cells.

[0123] FIG. 15 is a graph showing the generation of IL-2 by the T cells in FIG. 14 when exposed to tumor cells expressing no antigen (“CD19−HER2−”), CD19 antigen only (“CD19+HER2−”), HER2 antigen only (“CD19−HER2+”), or both antigens (“CD19+HER2+”). This data demonstrate that there is less background T cell activation in response to single antigen exposure when the LAT and SLP-76 CAR constructs do not share the same transmembrane domain.

[0124] FIG. 16 is a set of graphs illustrating cytotoxicity of T cells expressing different LAT CAR molecules alone, including the construct used previously with a CD28 hinge/TM domain and constructs with the H/TM domain swapped with the TM domain from CD4 and the H (hinge) domain from IgG4 or CD4 (see the lower panel on the right for a cartoon of the construct structure). The expression of each LAT CAR molecule was confirmed by histogram of FACS data (upper right panel), demonstrating that the CAR construct containing both CD4 hinge and transmembrane domains did not express well. The cytotoxicity of T cells expressing each of the CD19-targeting CARs containing LAT and being mixed with CD19+HER2− tumor cells at a ratio of 1:1 or 1:2 were plotted through the time (upper left and bottom left panels). In both cytotoxicity plots, the top line represents using the CD19−CD4H/TM-LAT construct, the middle line represents using CD19-IgG4H/CD4TM-LAT, and the bottom line represents using CD19−CD28H/TM-LAT.

[0125] FIG. 17 is a set of FACS histograms comparing expression of LAT CARs and SLP-76 CARs with different hinge/TM combinations.

[0126] FIG. 18 is a set of graphs illustrating cytotoxicity by the T cells expressing LAT and SLP-76 CARs combinations with different Hinge/TM combinations in FIG. 17. Tumor cells expressing CD19 only (“CD19+HER2−”, the left panel), HER2 only (“CD19−HER2+”, the middle panel), or both CD19 and HER2 (“CD19+HER2+”, the right panel) were used to present antigen to activate T cells. Only the combination containing a LAT CAR containing an IgG4-hinge/CD4 TM (paired with a SLP-76 CAR containing a CD8 hinge/TM domain) showed no background killing activity against single antigen positive cells (the left panel) but a good killing capacity against double antigen positive cells (the right panel).

[0127] FIG. 19 is a bar chart illustrating IL-2 production by the T cells in FIG. 18, when exposed to tumor cells not expressing CD19 or HER2 (“19−HER2−”), or tumor cells expressing CD19 only (“19+HER2−”), HER2 only (“19−HER2+”) or both CD19 and HER2 (“19+HER2+”).

[0128] FIGS. 20A-20C are a set of graphs showing CAR expression and IL-2 production for each of the LAT/SLP-76 CAR combinations. FIG. 20A is a set of FACS histograms to show CAR expression in T cells. FIG. 20B is a set of histograms illustrating the expressed CAR combinations, including a negative control without expressing CAR combinations (top trace), CD19−CD28H/TM-LAT and HER2−CD8H/TM-SLP-76 (second trace from top), CD19−IgG4H/CD4TM-LAT and HER2−CD8H/TM-SLP-76 (third trace from top), and CD19−IgG4H/CD4TM-LAT and HER2−CD28H/TM-SLP-76 (bottom trace). FIG. 20C is a bar chart comparing IL-2 production by T cells expressing the listed CAR combinations in response to no antigen, single antigen of CD19 or HER2, or CD19 and HER2 antigens. The combination of the LAT CAR with an IgG4-hinge/CD4TM domain and the SLP-76 CAR with a CD28 hinge/TM domain results in no activity against single antigen positive cells but high activation and IL-2 production against double antigen positive cells.

[0129] FIG. 21 is a set of graphs illustrating cytotoxicity of T cells expressing the listed LAT and SLP-76 CAR combinations in response to either single or both antigens. The combination of the LAT CAR with an IgG4-hinge/CD4TM domain and the SLP-76 CAR with a CD28 hinge/TM domain results in no activity against single antigen positive cells but strong killing activity against double antigen positive cells.

[0130] FIGS. 22A-22C are graphs illustrating T cell activation in response to single or double antigens. FIG. 22A are histograms showing expressed CAR combinations, including CD19−IgG4H/CD4TM-LAT+HER2−CD28H/TM-SLP-76 (the second trace from top), CD19−IgG4H/CD4TM-LAT+HER2−CD28H/TM-SLP-76^{K30R} (in which SLP-76 is mutated at the lysine at position 30 to decrease ubiquitination) (the bottom trace), and a negative control without CAR combinations (“Mock”, the top trace). FIG. 22B are FACS histograms showing the T cells expressing any one of the CAR combinations. FIG. 22C is a bar graph comparing IL-2 production by the T cells in FIG. 22B, demonstrating that the K30R mutation in the SLP-76 CAR construct results in enhanced activity against double antigen positive tumor without increasing activity against tumor cells expressing a single antigen.

[0131] FIGS. 23A-23C are graphs illustrating T cell activation in response to single or double antigens. FIG. 23A are histograms showing expressed CAR combinations, including CD19−IgG4H/CD4TM-LAT+HER2−CD28H/TM-SLP-76 (the second trace from top), CD19−IgG4H/CD4TM-LAT^{G160D}+HER2−CD28H/TM-SLP-76 (in which LAT is mutated at the Glycine at position 160 to increase activation) (the bottom trace), and a negative control without CAR combinations (“Mock”, the top trace). FIG. 23B are FACS histograms showing the T cells expressing any one of the CAR combinations. FIG. 23C is a bar graph comparing IL-2 production by T cells in this figure, demonstrating that the G160D mutation in the LAT construct results in enhanced activity against double antigen positive tumor with a minimal increase in activity against tumor cells expressing a single antigen CD19.

[0132] FIGS. 24A-24C are a set of graphs comparing T cell activation capacity of various CAR combinations. FIG. 24A is a set of FACS histograms illustrating T cells expressing the listed CAR combinations (e.g., a CAR construct containing LAT and a CAR construct containing CD5, CD6, FcγR1, or 4-1BB). FIG. 24B is a graph showing cytokine production induced by these CAR combinations against single or double antigen positive tumor cells. FIG. 24C is a series of graphs comparing killing of single or double antigen positive tumor cells by these CAR combinations.

[0133] FIGS. 25A-25C are a set of graphs comparing T cell activation capacity of various CAR combinations (e.g., a CD2 CAR combined with a LAT CAR with various hinge-transmembrane domains). FIG. 25A is a set of FACS histograms illustrating T cells expressing the listed CAR combinations. FIG. 25B is a graph showing cytokine production induced by these CAR combinations against single or double antigen positive tumor cells. FIG. 25C is a series of graphs showing killing of single or double antigen positive tumor cells by the listed CAR combinations.

[0134] FIGS. 26A-26C are a set of graphs comparing T cell activation capacity of various CAR combinations (e.g., a CD28 CAR combined with a LAT CAR with various hinge-transmembrane domains). FIG. 26A is a set of FACS histograms illustrating T cells expressing the listed CAR combinations. FIG. 26B is a graph showing cytokine production induced by the listed CAR combinations against single or double antigen positive tumor cells. FIG. 26C is a series of graphs showing killing of single or double antigen positive tumor cells by the listed CAR combinations.

[0135] FIGS. 27A and 27B are a set of graphs comparing T cell activation capacity of various CAR combinations, including a SLP-76 CAR with a CD8 hinge-transmembrane domain combined with either a LAT CAR with a CD28 hinge-transmembrane domain or a LAT CAR with a CD28 hinge-transmembrane domain in which the two cysteine residues have been mutated (2CA). FIG. 27A is a set of FACS histograms illustrating expression of T cells expressing the listed CAR combinations. FIG. 27B is a graph showing cytokine production induced by the listed CAR combinations against single or double antigen positive tumor cells.

[0136] FIGS. 28A and 28B are a set of graphs comparing T cell activation capacity of various CAR combinations, including a CAR molecule containing a wild-type LAT or a LAT mutant with mutations in its GADS binding site (“LAT^{2YF}”, containing mutations of Y200F and Y220F), combined with a CAR molecule containing a wild-type SLP-76 or a SLP-76 mutant in which the GADS binding site was deleted (“SLP76^{224-244 del}”) FIG. 28A is a set of FACS histograms illustrating expression of T cells expressing the listed CAR combinations. FIG. 28B is a graph showing cytokine production induced by the listed CAR combinations against single or double antigen positive tumor cells.

[0137] FIGS. 29A and 29B are a set of graphs comparing T cell activation capacity of various CAR combinations, including a CAR molecule containing a wild-type LAT or a LAT mutant with a deletion of its GADS and GRB2 binding sites (“LAT^{200-262 del}” with a deletion of amino acids from position 200 to position 262), combined with a CAR molecule containing a wild-type SLP-76 or a SLP-76 mutant in which the GADS binding site was deleted (“SLP76^{224-244del}”). FIG. 29A is a set of FACS histograms illustrating expression of T cells expressing the listed CAR combinations. FIG. 29B is a graph showing cytokine production induced by the listed CAR combinations against single or double antigen positive tumor cells.

[0138] FIGS. 30A-30C are a set of graphs comparing T cell activation capacity of various CAR combinations, including a wild-type LAT CAR construct combined with a wild-type SLP-76 CAR construct, or a CAR construct containing a LAT mutant with mutations in its GADS binding site (“LAT^{2YF}”, containing mutations of Y200F and Y220F) combined with a CAR construct containing a SLP-76 mutant in which the GADS binding site was deleted (“SLP76^{224-244del}”). FIG. 30A is a set of FACS histograms illustrating expression of T cells expressing the listed CAR combinations. FIG. 30B is a graph showing cytokine production induced by the listed CAR combinations against single or double antigen positive tumor cells. FIG. 30C is a series of graphs showing killing of single or double antigen positive tumor cells by the listed CAR combinations.

[0139] FIGS. 31A-31C are a set of graphs comparing T cell activation capacity of various CAR combinations, including a LAT CAR construct containing a CD28 hinge-transmembrane domain in which the two cysteine residues have been mutated (2CA), combined with a wild-type SLP-76 CAR construct, or a LAT CAR construct containing both the 2CA mutations and the 2YF (i.e., Y200F and Y220F) mutations in its GADS binding sites, combined with a CAR construct containing a SLP-76 mutant in which the GADS binding site was deleted (“SLP76^{224-244 del}”). FIG. 31A is a set of FACS histograms illustrating expression of T cells expressing the listed CAR combinations. FIG. 31B is a series of graphs showing cytokine production induced by the listed CAR combinations against single or double antigen positive tumor cells. FIG. 31C is a series of graphs showing killing of single or double antigen positive tumor cells by the listed CAR combinations. The bottom line in the left panel and the top line in the right panel represent the combination of CD19−28H/TM(2CA)-LAT+HER2−8H/TM-SLP-76.

[0140] FIGS. 32A and 32B are a set of graphs comparing T cell activation by variant CAR combinations. FIG. 32A is a set of FACS histograms illustrating T cells expressing CAR combinations, including a CAR construct containing a wild-type SLP-76 or a SLP-76 mutant with a deleted GADS binding site (“SLP76^{224-244 del}”), combined with a CAR construct containing a wild-type LAT or a LAT with mutations in the GADS and GRB2 binding sites (“LAT^{3YF}”, containing Y200F, Y220F and Y252F mutations). FIG. 32B is a graph showing cytokine production induced by the listed CAR combinations against single or double antigen positive tumor cells.

[0141] FIGS. 33A-33C are graphs showing that CAR constructs containing a truncated ZAP70 (“ZAP70²⁵⁵⁻⁶⁰⁰”) confer an advantage over traditional CARs when using scFvs prone to tonic signaling. In FIG. 33A, traditional CARs targeting GD2 with a high affinity binder (HA) (top panels) or B7-H3 (the bottom panels) were used, containing either a CD28zeta or a 4-1BBzeta domain. The “CAR” panels show T cell expression of each CAR molecule. The “CD39”/“LAG-3”/“PD-1”/“TIM-3” panels show surface expression of exhaustion markers on CAR-T cells, indicative of T cell exhaustion. In FIG. 33B, a similar experiment was perform as in FIG. 33A, while the used traditional CAR molecules recognize CD19, B7-H3 or GD2 and contain a 4-1BBzeta domain. FIG. 33C exhibits the proportions of LAG-3±, TIM-3±, PD-1±populations in CAR T cells targeting B7-H3 (the top panels) or GD2 (the bottom panels), containing corresponding B7-H3/GD2 CAR constructs with 4-1BB-zeta or ZAP-70²⁵⁵⁻⁶⁰⁰ endodomains. Outside each pie figure, from closer to farther from the pie, curves are used to show cell populations for LAG-3+, TIM-3+ and PD-1+, respectively.

[0142] FIGS. 34A-34E are graphs showing the anti-tumor function of T cells expressing different CAR constructs. FIG. 34A shows a histogram showing the expression of B7-H3-targeting CARs, including a traditional CAR construct bearing 4-1BB-zeta endodomains and a CAR construct containing the ZAP70²⁵⁵⁻⁶⁰⁰ fragment. FIG. 34B shows tumor measurements from mice inoculated with luciferase expressing neuroblastoma xenografts (CHLA255) and treated with T cells expressing the traditional B7-H3-4-1BB-zeta CAR or the B7-H3-truncated-ZAP70 CAR. FIG. 34C exhibits tumor measurements (top) and survival (bottom) from mice as treated in FIG. 34B in a longer time frame. FIG. 34D shows the amount of T cells bearing B7-H3-4-1BB-zeta CARs or B7-H3-truncated-ZAP70 CARs harvested from the spleens of mice inoculated with luciferase expressing CHLA-255. FIG. 34E shows the amount of T cells bearing B7-H3-4-1BB-zeta CARs or B7-H3-truncated-ZAP70 CARs harvested from the bone marrow of mice inoculated with luciferase-expressing CHLA-255.

[0143] FIG. 35 is a set of graphs showing cytokine generation by T cells expressing different CAR constructs. The top panel is a histogram showing the expression of B7-H3-targeting CARs containing the ZAP70²⁵⁵⁻⁶⁰⁰ fragment with or without further mutations that enhance its efficacy (e.g., Y292F, Y492F, K544R, Y597F, and Y598F). The bottom panel is a bar graph showing IL-2 generation by T cells expressing these CAR constructs in response to antigen encounter with Nalm6 leukemia tumor cells or 143B osteosarcoma cells. The bars for each condition refer to, from left to right, mock, B7-H3-28htm-ZAP-70²⁵⁵⁻⁶⁰⁰, B7-H3-28htm-ZAP-70^{255-600 Y292F}, B7-H3-28htm-ZAP-70^{255-600 Y492F}, B7-H3-28htm-ZAP-70^{255-600 K544R}, and B7-H3-28htm-ZAP-70^{255-600 Y597A Y598A}.

[0144] FIG. 36 is a set of graphs showing cytokine generation by T cells expressing different CAR constructs. The top panel is a histogram showing the expression of B7-H3-targeting CARs containing the ZAP70²⁵⁵⁻⁶⁰⁰ fragment with or without endowed costimulatory molecules (4-1BB or CD28). The bottom panel is a bar graph showing IL-2 generation by T cells expressing the CAR constructs in response to antigen encounter with tumor cells. The bars for each condition refer to, from left to right, mock, B7-H3-28htm-ZAP-70²⁵⁵⁻⁶⁰⁰, B7-H3-28htm-4-1BB-ZAP-70²⁵⁵⁻⁶⁰⁰, and B7-H3-28htm-CD28-ZAP-70²⁵⁵⁻⁶⁰⁰.

[0145] FIG. 37 is a set of graphs illustrating that the function of CAR constructs containing truncated ZAP70 does not depend on endogenous CD3zeta. The top panel shows expression of CAR and CD3zeta before (the third trace from top) or after (the bottom trace) deleting the endogenous CD3zeta using CRISPR-Cas9. The bottom panels show cytokine production by truncated-ZAP70 CARs with or without TCR (CD3zeta) knockout, demonstrating that the activity of the ZAP70 CAR construct is independent from the endogenous TCR in cells. The bars for each condition refer to, from left to right, HER2−28htm-ZAP-70²⁵⁵⁻⁶⁰⁰, HER2−28htm-ZAP-70²⁵⁵⁻⁶⁰⁰ TRAC KO, mock, and mock TRAC KO.

[0146] FIGS. 38A-38C are a set of graphs comparing T cell activation capacity of various CAR combinations, including a CAR construct containing a LAT containing a CD28 hinge-transmembrane domain in which the two cysteine residues have been mutated (2CA), combined with a wild-type SLP-76 CAR construct with a CD8 hinge-transmembrane, or a CAR construct containing a LAT mutant with both the 2CA mutation in the CD28 hinge-transmembrane region and a truncation to remove its GADS binding sites (LAT^{220-262 del}) combined with a CAR construct containing a SLP-76 mutant in which the GADS binding site was deleted (“SLP76^{224-244del}”) on a CD8 hinge-transmembrane domain. FIG. 38A is a set of FACS histograms illustrating expression of T cells expressing the listed CAR combinations. FIG. 38B is a graph showing cytokine production induced by the listed CAR combinations against single or double antigen positive tumor cells. FIG. 38C is a series of graphs showing killing of single or double antigen positive tumor cells by the listed CAR combinations. The bottom line in the left panel represents the combination of CD19−28H/TM(2CA)-LAT+HER2−8H/TM-SLP-76.

[0147] FIG. 39 is a set of graphs showing the anti-tumor function of T cells expressing different CAR constructs. The top panel exhibits graphs showing the fold change of bioluminescent tumor measurements from mice inoculated with luciferase expressing diffuse intrinsic pontine glioma 6 xenografts (DIPG-6) and treated with T cells expressing the traditional B7-H3-4-1BB-zeta CAR or the B7-H3-truncated-ZAP70 (ZAP-70²⁵⁵⁻⁶⁰⁰ fragment) CAR. The bottom panel shows the amount of T cells bearing B7-H3-4-1BB-zeta CARs or B7-H3-truncated-ZAP70 CARs harvested from the spleens of mice inoculated with luciferase-expressing DIPG-6.

[0148] FIG. 40 is a set of graphs showing the anti-tumor function of T cells expressing different CAR constructs. The top panel exhibits graphs showing tumor measurements from mice inoculated with luciferase expressing diffuse intrinsic pontine glioma 6 xenografts (DIPG-6) and treated with T cells expressing the traditional GD2-4-1BB-zeta CAR or the GD2-truncated-ZAP70 (ZAP-70²⁵⁵⁻⁶⁰⁰ fragment) CAR. The bottom panel shows the amount of T cells bearing GD2-4-1BB-zeta CARs or GD2-truncated-ZAP70 CARs harvested from the spleens of mice inoculated with luciferase-expressing DIPG-6.

[0149] FIG. 41 is a set of graphs showing the anti-tumor function of T cells expressing different CAR constructs. The top panel exhibits graphs showing tumor measurements from mice inoculated with GD2 and luciferase expressing leukemia xenografts (GD2⁺-Nalm6) and treated with T cells expressing the traditional GD2-4-1BB-zeta CAR or the GD2-truncated-ZAP70 (ZAP-70²⁵⁵⁻⁶⁰⁰ fragment) CAR. The bottom panel shows a histogram with expression of the CAR constructs (left) and the amount of T cells bearing GD2-4-1BB-zeta CARs or GD2-truncated-ZAP70 CARs harvested from the spleens of mice inoculated with luciferase-expressing GD2⁺-Nalm6.

[0150] FIG. 42 is a set of graphs that mutations capable of increasing kinase activity of ZAP-70 can be incorporated into CARs containing ZAP-70²⁵⁵⁻⁶⁰⁰ fragment endodomains. Similar to FIG. 35, the top panel is a histogram showing the expression of B7-H3-targeting CARs containing the ZAP70²⁵⁵⁻⁶⁰⁰ fragment with or without further mutations that enhance its efficacy (e.g. V314A, D327P, R360P, and K362E). The bottom panel is a graph showing cytokine production by T cells expressing these CAR constructs in response to antigen encounter with tumor cells.

[0151] FIG. 43 is a set of graphs showing that costimulatory domains and enhancing mutations can be combined to improve the potency of T cells bearing CARs containing ZAP-70²⁵⁵⁻⁶⁰⁰ fragment endodomains. The top panel is a histogram showing the expression of B7-H3-targeting ZAP-70²⁵⁵⁻⁶⁰⁰ fragment CARs with 4-1BB costimulatory domains and/or a Y292F enhancing mutation on T cells. The bottom panel shows IL-2 cytokine production by the indicated CAR T cells in response to antigen encounter with neuroblastoma CHLA-255 (left) or osteosarcoma 143B (right) tumor cells. In both panels, bars represent the constructs for, from left to right, mock control, B7-H3-28htm-ZAP-70²⁵⁵⁻⁶⁰⁰, B7-H3-28htm-4-1BB-ZAP-70²⁵⁵⁻⁶⁰⁰, B7-H3-28htm-ZAP-70^{255-600 Y292F}, and B7-H3-28htm-4-1BB-ZAP-70^{255-600 Y292F}, respectively.

[0152] FIG. 44 is a set of graphs showing that costimulatory domains and enhancing mutations can be added to improve the potency of T cells bearing CARs containing ZAP-70²⁵⁵⁻⁶⁰⁰ fragment endodomains for scFvs without tonic signaling such as anti-CD19 scFvs described herein. The top panel shows IL-2 (left) and IFNγ (right) cytokine production by CAR T cells combining ZAP-70²⁵⁵⁻⁶⁰⁰ fragments with CD28 costimulatory domains and/or a Y292F enhancing mutation. The bottom panel shows IL-2 (left) and IFNγ (right) cytokine production by CAR T cells combining ZAP-70²⁵⁵⁻⁶⁰⁰ fragments with 4-1BB costimulatory domains and/or a Y292F enhancing mutation in response to antigen encounter with Nalm6 tumor cells.

[0153] FIG. 45 is a set of graphs showing that the interdomain B portion of the ZAP-70²⁵⁵⁻⁶⁰⁰ fragment CAR can be further truncated to decrease packaging size of the delivery vector without compromising CAR T cell efficacy. The top panel is a histogram showing the expression of B7-H3-targeting CARs containing various truncated ZAP-70 endodomains (ZAP-70²⁸⁰⁻⁶⁰⁰ and ZAP-70³⁰⁸⁻⁶⁰⁰) in addition to the ZAP70²⁵⁵⁻⁶⁰⁰ fragment. The middle panel is a graph showing cytokine production by T cells expressing these CAR constructs in response to antigen encounter with B7-H3⁺Nalm6 tumor cells. The bottom panel is a series of graphs showing killing of B7-H3⁺Nalm6 tumor cells by T cells expressing these CAR constructs.

[0154] FIG. 46 is a set of graphs illustrating that T cells with combined LAT and SLP-76 endodomain CARs bearing B7-H3/GD2 scFvs show less exhausted phenotypes compared to traditional B7-H3/GD2-4-1BBzeta CAR T cells. The top panel exhibits histograms showing expression of the CAR constructs as well as PD-1, LAG-3, and TIM-3 exhaustion markers on CART cells with a B7H3-targeting 4-1BB-zeta construct or combinations of a B7-H3/CD19-targeting LAT−CD28 hinge-transmembrane domain CAR with a CD19/B7-H3-targeting SLP-76 CD8 hinge-transmembrane domain CAR. The bottom panel exhibits histograms showing expression of the CAR constructs as well as PD-1, LAG-3, and TIM-3 exhaustion markers on CART cells with a GD2-targeting 4-1BB-zeta construct or combinations of a GD2/CD19-targeting LAT−CD28 hinge-transmembrane domain CAR with a CD19/GD2-targeting SLP-76 CD8 hinge-transmembrane domain CAR.

[0155] FIGS. 47A-47C are graphs illustrating that CD19-targeting LAT−CD28 hinge-transmembrane CARs in which the GADS binding region has been deleted (LAT^{200-262del}) can be further truncated to decrease packaging size of the delivery vector without compromising CAR T cell efficacy, when paired with a HER2-targeting SLP-76 CAR construct. FIG. 47A shows flow cytometric plots exhibiting CAR expression of the listed combos in which additional amino acids have been removed from LAT (LAT^{28-90del} or LAT^{28-130del} in addition to the LAT^{200-262del}). FIG. 47B shows cytokine production by CAR T cells expressing the listed CAR molecule combinations in response to antigen encounter with no tumor control or CD19+HER2−, CD19−HER2+, or CD19+HER2+ leukemia cells (Nalm6). FIG. 47C shows graphs exhibiting killing of the CD19+HER2+ Nalm6 tumor cells by CAR T cells expressing the LAT/SLP-76 CAR molecule combinations as shown in FIG. 47A and FIG. 47B.

[0156] FIGS. 48A-48C are graphs showing that HER2-targeting SLP-76-CD8 hinge-transmembrane CARs in which the GADS binding region has been deleted (SLP-76_{224-244del}) can be further truncated to decrease packaging size of the delivery vector without compromising CAR T cell efficacy, when paired with a CD19-targeting LAT CAR construct. FIG. 48A shows flow cytometric plots exhibiting CAR expression of the listed combos in which additional amino acids have been removed from SLP-76 (SLP-76^{1-81del, 224-244del}, SLP-76^{224-265del}, or SLP-76^{224-300del}). FIG. 48B shows cytokine production by CAR T cells listed in FIG. 48A in response to antigen encounter with no tumor control or CD19+HER2−, CD19−HER2+, or CD19+HER2+ leukemia cells (Nalm6). FIG. 48C shows graphs exhibiting killing of the CD19+HER2+ Nalm6 tumor cells by CAR T cells listed in FIG. 48A and FIG. 48B.

[0157] FIGS. 49A-49B are graphs showing the expression of endogenous ROR1 on human and murine tissues. FIG. 49A is a human lung single-cell dataset from Travaglini et al. 2020 showing ROR1 expression most prominently on alveolar type I cells (AGER+, EMP2+) and to a lesser extent alveolar type II cells (SFTPC+), adventitial fibroblasts and alveolar fibroblasts (PDGFRA+), pericytes (HIGD1B+, PTN+), and vascular smooth muscle cells (ACTA2 high). Markers used to identify cells are indicated below the UMAP plot. FIG. 49B shows human (left) and mouse (right) ROR1 expression analyzed from single-cell RNA datasets. Violin plots (bottom) were generated by sampling 500 cells within each dataset and plotting ROR1 expression for all cells and the cluster with the highest mean expression of ROR1.

[0158] FIG. 50 is a schematic illustrating the potential for on-target/off-tumor toxicity when targeting ROR1 with CAR T cell therapy in a murine model.

[0159] FIGS. 51A-51B are graphs showing that various CAR combinations can be engineered to target tumor cells bearing ROR1 and CD19 antigens in vitro, including a ROR1−CD28-zeta CAR and CARs featuring a wild-type SLP-76 CAR with a CD8 hinge-transmembrane domain or a mutant in which the GADS binding region has been truncated (SLP-76^{224-244del}) combined with a wild-type LAT CAR with a CD28 hinge-transmembrane domain or a LAT CAR in which two cysteine residues in the CD28 hinge-transmembrane domain have been mutated (2CA) and/or the GADS binding region has been truncated (LAT^{200-262del}). FIG. 51A exhibits flow cytometry plots exhibiting the expression of the listed CAR combinations. For each panel, the x-axis represents the levels of CD19−SLP-76 CAR construct (DL 488), while they-axis represents the levels of ROR1-LAT CAR construct (DL 650). FIG. 51B exhibits killing of ROR1+CD19−, ROR1−CD19+, and ROR1+CD19+ leukemia lines (Nalm6) by T cells bearing the listed CAR combinations. For each panel, the x-axis represents the time (hours), while they-axis represents the cytotoxicity index.

[0160] FIGS. 52A-52C are graphs showing that various LAT & SLP-76 CAR combinations can be engineered to safely target ROR1/CD19-bearing leukemia cells (Nalm6) in a murine in vivo model, as opposed to a ROR1−CD28-zeta CAR which causes lethal on-target, off-tumor toxicity. These CARs include a CD19-targeting wild-type SLP-76 CAR with a CD8 hinge-transmembrane domain or a mutant in which the GADS binding region has been truncated (SLP-76^{224-244del}) combined with a ROR1-targeting wild-type LAT CAR with a CD28 hinge-transmembrane domain or a LAT CAR in which two cysteine residues in the CD28 hinge-transmembrane domain have been mutated (2CA) and/or the GADS binding region has been truncated (LAT^{200-262del}). FIG. 52A exhibits graphs showing percent weight changes from mice inoculated with luciferase expressing leukemia xenografts (ROR1⁺Nalm6) and treated with T cells bearing the listed CAR combinations. FIG. 52B exhibits graphs showing tumor measurements of the mice following CAR T cell treatment.

[0161] FIG. 52C compares probability of animal survival after each CAR combination treatment. Lines representing survival after the treatment refer to, in the order of increased survival, ROR1-28ζ, ROR1-28htm-LAT+CD19−8htm-SLP-76, mock, ROR1-28htm^{2CA}-LAT+CD19−8htm-SLP-76, ROR1-28htm-LAT^{200-262del}+CD19−8htm-SLP-76^{224-244del} and ROR1-28htm^{2CA}-LAT^{200-262del}+CD19−8htm-SLP-76^{224-244del}.

[0162] FIGS. 53A-53B are graphs showing additional LAT & SLP-76 CAR combinations can be engineered to safely target ROR1/CD19-bearing leukemia cells (Nalm6) in a murine in vivo model, as opposed to a ROR1−CD28-zeta CAR which causes lethal on-target, off-tumor toxicity. These CARs include a ROR1-targeting wild-type SLP-76 CAR with a CD8 hinge-transmembrane domain or a mutant in which the GADS binding region has been truncated (SLP-76^{224-244del}) combined with a CD19-targeting wild-type LAT CAR with a CD28 hinge-transmembrane domain or a LAT CAR in which two cysteine residues in the CD28 hinge-transmembrane domain have been mutated (2CA) and the GADS binding region has been truncated (LAT^{200-262del}). FIG. 53A exhibits graphs showing percent weight changes (top panel) from mice inoculated with luciferase expressing leukemia xenografts (ROR1⁺Nalm6) and treated with T cells bearing the listed CAR combinations, and graphs showing tumor measurements (bottom panel) of the mice following CAR T cell treatment. FIG. 53B shows survival of the mice following CAR T cell treatments. Lines representing survival after the treatment refer to, in the order of increased survival, ROR1-28ζ, CD19−28htm-LAT+ROR1-8htm-SLP-76, and CD19−28htm^{2CA}-LAT^{200-262del}+ROR1-8htm-SLP-76^{224-244del}.

[0163] FIGS. 54A-54C are graphs showing that a LAT/SLP-76 CAR combination can be engineered to safely target ROR1/CD19-bearing leukemia cells (Nalm6) in a murine in vivo model, as opposed to a ROR1−CD28-zeta CAR or a combination of CD19-SynNotch and ROR1−CD28-zeta CARs (SynNotch), all of which cause lethal on-target, off-tumor toxicity. A combination of ROR1−CD8 hinge/transmembrane domain-zeta and CD19−CD28 CARs (SPLIT CAR) has no antitumor activity. The safe and effective LAT/SLP-76 CAR combination includes a CD19-targeting mutant SLP-76 CAR with a CD8 hinge-transmembrane domain in which the GADS binding region has been truncated (SLP-76^{224-244del}) combined with a ROR1-targeting mutant LAT CAR with a CD28 hinge-transmembrane domain in which two CD28 hinge-transmembrane domain cysteine residues have bene mutated (2CA) and the GADS binding region has been truncated (LAT^{200-262del}). FIG. 54A exhibits graphs showing percent weight changes from mice inoculated with luciferase expressing leukemia xenografts (ROR1+Nalm6) and treated with T cells bearing the listed CAR combinations. FIG. 54B shows tumor measurements of the mice following CAR T cell treatments. FIG. 54C exhibits graphs showing survival of the mice following CAR T cell treatments. Lines representing survival after the treatment refer to, in the order of increased survival, ROR1-28ζ, CD19-SynNotch→ROR1-28ζ, ROR1-8htm-ζ+CD19−28htm-CD28, Mock, and ROR1-28htm^{2CA}-LAT^{200-262del}+CD19−8htm-SLP-76^{224-244del}.

[0164] FIG. 55 is a set of graphs showing lower in vitro baseline cytokine (IFNγ) production by tonic-signaling GD2/B7-H3-targeting CAR T cells bearing CARs with ZAP-70²⁵⁵⁻⁶⁰⁰ fragment endodomains, as opposed to CAR T cells with traditional 4-1BB-zeta endodomains. The top panel shows cytokine production by B7-H3-targeting 4-1BB-zeta or ZAP-70²⁵⁵⁻⁶⁰⁰ fragment CAR T cells when unchallenged by tumor cells. The bottom panel shows cytokine production by GD2-targeting 4-1BB-zeta or ZAP-70²⁵⁵⁻⁶⁰⁰ fragment CAR T cells when unchallenged by tumor cells.

[0165] FIG. 56 is a graph showing an exemplary LINK T-reg system. Regulatory T cells (T-regs) are transduced with one or several vectors that drive expression of SLP-76 and LAT CARs described herein. The SLP-76 CAR and LAT CAR target different antigens (antigen 1 and antigen 2, respectively) that specifically expressed on an organ-site of autoimmunity, leading to activation of both intracellular signaling domains (labeled as “SLP-76 ICD” and “LAT−ICD”), forming an AND Gate signaling system, and eventually activation of the T-regs. The activated T-regs suppress self-reactive T cells and other self-reactive immune cells harmful to the organ site, thus preventing or treating autoimmunity.

[0166] FIG. 57 is a graph comparing cytotoxicity of T cells expressing CAR constructs containing different LAT domains [i.e., wild type LAT vs. LAT with its GADS binding region deleted (LAT^{200-262del})] towards Nalm6 tumor cells at 2:1 effector:target ratio. CD19-targeting LAT−CD28 hinge-transmembrane CARs in which the GADS binding region has been deleted (LAT^{200-262del}) and the cysteine residues in the CD28-hinge-transmembrane domain are either unmutated or mutated into alanine residues (2CA) do not kill tumor cells (Nalm6) upon antigen engagement, unlike a WT LAT−CD28 hinge-transmembrane CAR.

### DETAILED DESCRIPTION OF THE DISCLOSURE

[0167] The present disclosure relates generally to, inter alia, chimeric antigen receptor (CAR) polypeptides that can be used, alone or in combination for logic gatings, to activate cells (e.g., immune cells) expressing such CAR polypeptides and/or to target, antagonize, and/or eliminate specific cells (e.g., cancer cells) when multiple antigens are present. Furthermore, the CARs and systems of CARs described herein allow for reduction of T cell exhaustion in CAR T cells while maintaining their efficacy and potency. In addition, CAR T cell activity can be enhanced when antigen density is limiting. In some embodiments, the CARs or CAR combinations have an intracellular signaling domain without an immune receptor tyrosine based activation motif (ITAM). In some embodiments, the CARs or CAR combinations have an intracellular signaling domain without a CD3zeta (CD3ζ) domain. The disclosure also provides compositions and methods useful for making such polypeptides and CARs, as well as methods for the detection and treatment of conditions, such as diseases (e.g., cancers, hematological malignancies, solid tumors, autoimmune diseases, inflammations, allergic diseases, infections, senescence/aging, etc.)

[0168] Chimeric antigen receptors are recombinant receptor constructs which, in their usual format, graft the specificity of an antibody to the effector function of a T cell. Complete response rates of up to 90% for CD-19 CAR T cells in patients with leukemia illustrate the enormous potential of these therapeutics to revolutionize care of solid tumors if they could be unleashed safely (Majzner et al. Nat Med. 2019; 25:1341-1355). However, the lack of truly tumor-specific cell surface antigens has hampered development of CARs for solid tumors due to concerns about on-target killing of normal tissues that share the target antigen (known as ‘on-target, off tumor toxicity’), as has been observed in early phase clinical trials (Lamers et al. Mol Ther. 2013; 21:904-912) and in preclinical models (Srivastava et al. Cancer Cell. 2019; 35:489-503.e8; Smith et al. Mol Ther. 2016; 24:1987-1999). CAR T cells cannot discriminate between cancer and normal tissue if both normal and cancerous tissue express the target antigen. To date, no developed system can effectively overcome this intractable problem, greatly limiting the number of potential therapeutic targets and diseases that can be treated. Though adoptive cell therapy relies on a plethora of technological advances, CARs employed in the clinic today are relatively crude receptors that are similar to the first iterations developed more than twenty years ago (Gross et al. Proc Natl Acad Sci USA. 1989; 86(24):10024-10028). A system that controls CAR T cells similar to Boolean logic gates (e.g. AND) which integrates signals based on the presence of multiple antigens would drastically increase their safety, revolutionizing the field and greatly benefiting patients with cancer.

[0169] Within a chimeric antigen receptor (CAR), the intracellular signaling domain (a.k.a., cytosolic signaling domain) generally refers to a cytoplasmic domain that transmits an activation signal to the cell expressing the CAR molecule, following binding of the extracellular domain to the corresponding ligand or antigen. In some cases, the intracellular signaling domain includes a functional signaling domain derived from a stimulatory molecule. Traditional intracellular signaling domains almost always include CD3zeta, the prototypical “master switch” that elicits T cell activity (Irving and Weiss Cell 1991; 64:891-901; Letourneur and Klausner Science 1992; 255:79-82), as well as various optional costimulatory domains to enhance potency and persistence.

[0170] As described in greater detail below, CAR molecules have been designed and tested for their activities, as a substitute for traditional CAR molecules. In some embodiments, the intracellular signaling domain of these CAR molecules does not include an immune receptor tyrosine based activation motif (ITAM). For example, these CAR molecules do not have a CD3zeta (CD3ζ) domain. Instead, proteins involved in downstream TCR signaling (e.g., ZAP70 and PLCG1) were identified and were used as intracellular signaling domains for these CAR molecules, enabling the CAR molecules to sense extracellular signals and activate cells without the traditional CD3zeta signal domain.

[0171] Furthermore, based on the identification of some CAR molecules without an ITAM (e.g., without CD3zeta) in their intracellular signaling domains, CAR molecules can be combined to sense a combination of extracellular signals (compared to one or limited number of signals for each of traditional CAR molecules) to activate cells, which enables more precise ligand/antigen selections to target specific cells (e.g., cancer/tumor cells) without a least “off-tumor” toxicity.

[0172] The experimental results presented herein demonstrate that CAR molecules, such as those without an ITAM (e.g., without CD3zeta), were capable of activating the corresponding CAR T cells, resulting in increased antitumor efficacy (e.g., enhanced cytokine production and cytotoxicity). Further, combinations of these CARs similar to Boolean logic gates (e.g. AND gates) integrate signals based on the presence of multiple antigens, which would drastically increase their safety. Domain swap and mutations have been used to engineer CAR molecules or CAR molecule combinations with enhanced specificity and/or potency. Other advantages may include, e.g., reducing T cell exhaustion in CAR T cells expressing the CAR molecules or CAR combinations, while maintaining their efficacy and potency, and/or enhancing CAR T cell activity when antigen density is limiting.

[0173] Nucleic acid molecules encoding these polypeptides are also provided. The disclosure also provides compositions and methods useful for producing such CAR polypeptides, as well as methods for the prevention and/or treatment of conditions, such as cancer.

[0174] All publications and patent applications mentioned in this disclosure are herein incorporated by reference to the same extent as if each individual publication or patent application was specifically and individually indicated to be incorporated by reference.

### General Experimental Procedures

[0175] The practice of the present invention will employ, unless otherwise indicated, conventional techniques of molecular biology, microbiology, cell biology, biochemistry, nucleic acid chemistry, and immunology, which are well known to those skilled in the art. Such techniques are explained fully in the literature, such as Sambrook, J., & Russell, D. W. (2012). Molecular Cloning: A Laboratory Manual (4th ed.). Cold Spring Harbor, NY: Cold Spring Harbor Laboratory and Sambrook, J., & Russel, D. W. (2001). Molecular Cloning: A Laboratory Manual (3rd ed.). Cold Spring Harbor, NY: Cold Spring Harbor Laboratory (jointly referred to herein as “Sambrook”); Ausubel, F. M. (1987). Current Protocols in Molecular Biology. New York, NY: Wiley (including supplements through 2014); Bollag, D. M. et al. (1996). Protein Methods. New York, NY: Wiley-Liss; Huang, L. et al. (2005). Nonviral Vectors for Gene Therapy. San Diego: Academic Press; Kaplitt, M. G. et al. (1995). Viral Vectors: Gene Therapy and Neuroscience Applications. San Diego, CA: Academic Press; Lefkovits, I. (1997). The Immunology Methods Manual: The Comprehensive Sourcebook of Techniques. San Diego, CA: Academic Press; Doyle, A. et al. (1998). Cell and Tissue Culture: Laboratory Procedures in Biotechnology. New York, NY: Wiley; Mullis, K. B., Ferré, F. & Gibbs, R. (1994). PCR: The Polymerase Chain Reaction. Boston: Birkhauser Publisher; Greenfield, E. A. (2014). Antibodies: A Laboratory Manual (2nd ed.). New York, NY: Cold Spring Harbor Laboratory Press; Beaucage, S. L. et al. (2000). Current Protocols in Nucleic Acid Chemistry. New York, NY: Wiley, (including supplements through 2014); and Makrides, S. C. (2003). Gene Transfer and Expression in Mammalian Cells. Amsterdam, NL: Elsevier Sciences B.V., the disclosures of which are incorporated herein by reference. As appropriate, procedures involving the use of commercially available kits and reagents are generally carried out in accordance with manufacturer defined protocols and/or parameters unless otherwise noted.

### Definition

[0176] Unless otherwise defined, all terms of art, notations and other scientific terms or terminology used herein are intended to have the meanings commonly understood by those of skill in the art to which this disclosure pertains. In some cases, terms with commonly understood meanings are defined herein for clarity and/or for ready reference, and the inclusion of such definitions herein should not necessarily be construed to represent a substantial difference over what is generally understood in the art. Many of the techniques and procedures described or referenced herein are well understood and commonly employed using conventional methodology by those skilled in the art.

[0177] The singular form “a”, “an”, and “the” include plural references unless the context clearly dictates otherwise. For example, the term “a cell” includes one or more cells, including mixtures thereof. “A and/or B” is used herein to include all of the following alternatives: “A”, “B”, “A or B”, and “A and B”.

[0178] The term “about”, as used herein, has its ordinary meaning of approximately. If the degree of approximation is not otherwise clear from the context, “about” means either within plus or minus 10% of the provided value, or rounded to the nearest significant figure, in all cases inclusive of the provided value. Where ranges are provided, they are inclusive of the boundary values.

[0179] The term “derived from” refers to the origin or source of a molecule, and may include naturally occurring, recombinant, unpurified, or purified molecules. Nucleic acid or polypeptide molecules are considered “derived from” when they include portions or elements assembled in such a way that they produce a functional unit. The portions or elements can be assembled from multiple sources provided that they retain evolutionarily conserved function. In some embodiments, the derivative nucleic acid or polypeptide molecules include substantially the same sequence as the source nucleic acid or polypeptide molecule. For example, the derivative nucleic acid or polypeptide molecules of the present disclosure may have at least 80%, 85%, 90%, 95%, 98%, 99%, or 100% sequence identity to the source nucleic acid or polypeptide molecule.

[0180] The term “recombinant” nucleic acid molecule, polypeptide, and/or cell, as used in the instant application, refers to a nucleic acid molecule, polypeptide, and/or cell that has been altered through human intervention. As non-limiting examples, a recombinant nucleic acid molecule can be one which: 1) has been synthesized or modified in vitro, for example, using chemical or enzymatic techniques, or recombination of nucleic acid molecules; 2) includes conjoined nucleotide sequences that are not conjoined in nature; 3) has been engineered using molecular cloning techniques such that it lacks one or more nucleotides with respect to the naturally occurring nucleic acid molecule sequence; and/or 4) has been manipulated using molecular cloning techniques such that it has one or more sequence changes or rearrangements with respect to the naturally occurring nucleic acid sequence. A non-limiting example of a recombinant protein is a chimeric antigen receptor as provided herein.

[0181] The terms “cell”, “cell culture”, “cell line” refer not only to the particular subject cell, cell culture, or cell line but also to the progeny or potential progeny of such a cell, cell culture, or cell line, without regard to the number of transfers or passages in culture. It should be understood that not all progeny are exactly identical to the parental cell. This is because certain modifications may occur in succeeding generations due to either mutation (e.g., deliberate or inadvertent mutations) or environmental influences (e.g., methylation or other epigenetic modifications), such that progeny may not, in fact, be identical to the parent cell, but are still included within the scope of the term as used herein, so long as the progeny retain the same functionality as that of the originally cell, cell culture, or cell line.

[0182] As used herein, a “host cell” refers to a cell for introduction of a nucleic acid and/or a polypeptide (e.g., the CAR molecules) described herein and/or a cell for expressing a nucleic acid or a polypeptide described herein. Host cells can be either untransformed cells or cells that have already been introduced with at least one nucleic acid molecule (e.g., the CAR molecules) described herein. A “recombinant cell” refers to a cell having genetic modifications and/or having introduced nucleic acids and/or polypeptides described herein.

[0183] As used herein, a “subject” or an “individual” includes animals, such as human (e.g., human subjects) and non-human animals. In some embodiments, a “subject” or “individual” is a patient under the care of a physician. Thus, the subject can be a human patient or an individual who has, is at risk of having, or is suspected of having a disease of interest (e.g., cancer) and/or one or more symptoms of the disease. The subject can also be an individual who is diagnosed with a risk of the condition of interest at the time of diagnosis or later. The term “non-human animals” includes all vertebrates, e.g., mammals, e.g., rodents, e.g., mice, and non-mammals, such as non-human primates, e.g., sheep, dogs, cows, chickens, amphibians, reptiles, etc.

[0184] The term “vector” is used herein to refer to a nucleic acid molecule or sequence capable of transferring or transporting another nucleic acid molecule. For example, a vector can be used as a gene delivery vehicle to transfer a gene into a cell. The transferred nucleic acid molecule is generally linked to, e.g., inserted into, the vector nucleic acid molecule. Generally, a vector is capable of replication when associated with the proper control elements. The term “vector” includes cloning vectors and expression vectors, as well as viral vectors and integrating vectors. An “expression vector” is a vector that includes a regulatory region, thereby capable of expressing DNA sequences and fragments in vitro and/or in vivo. A vector may include sequences that direct autonomous replication in a cell, or may include sequences sufficient to allow integration into host cell DNA. Useful vectors include, for example, plasmids (e.g., DNA plasmids or RNA plasmids), transposons, cosmids, bacterial artificial chromosomes, and viral vectors. Useful viral vectors include, e.g., replication defective retroviruses and lentiviruses. In some embodiments, a vector is a gene delivery vector.

[0185] It is understood that aspects and embodiments of the disclosure described herein include “comprising,” “consisting,” and “consisting essentially of” aspects and embodiments. As used herein, “comprising” is synonymous with “including”, “containing”, or “characterized by”, and is inclusive or open-ended and does not exclude additional, unrecited elements or method steps. As used herein, “consisting of” excludes any elements, steps, or ingredients not specified in the claimed composition or method. As used herein, “consisting essentially of” does not exclude materials or steps that do not materially affect the basic characteristics of the claimed composition or method. Any recitation herein of the term “comprising”, particularly in a description of components of a composition or in a description of steps of a method, is understood to encompass those compositions and methods consisting essentially of and consisting of the recited components or steps.

[0186] Headings, e.g., (a), (b), (i) etc., are presented merely for ease of reading the specification and claims. The use of headings in the specification or claims does not require the steps or elements be performed in alphabetical or numerical order or the order in which they are presented.

[0187] As can be understood by one having ordinary skill in the art, for any and all purposes, such as in terms of providing a written description, all ranges disclosed herein also encompass any and all possible sub-ranges and combinations of sub-ranges thereof. Any listed range can be easily recognized as sufficiently describing and enabling the same range being broken down into at least equal halves, thirds, quarters, fifths, tenths, etc. As a non-limiting example, each range discussed herein can be readily broken down into a lower third, middle third and upper third, etc. As can also be understood by one skilled in the art all language such as “up to”, “at least”, “greater than”, “less than”, and the like include the number recited and refer to ranges which can be subsequently broken down into sub-ranges as discussed above. Finally, as can be understood by one skilled in the art, a range includes each individual member. Thus, for example, a group having 1-3 articles refers to groups having 1, 2, or 3 articles. Similarly, a group having 1-5 articles refers to groups having 1, 2, 3, 4, or 5 articles, and so forth.

[0188] Certain ranges are presented herein with numerical values being preceded by the term “about.” The term “about” is used herein to provide literal support for the exact number that it precedes, as well as a number that is near to or approximately the number that the term precedes. In determining whether a number is near to or approximately a specifically recited number, the near or approximating unrecited number may be a number which, in the context in which it is presented, provides the substantial equivalent of the specifically recited number.

[0189] It is appreciated that certain features of the disclosure, which are, for clarity, described in the context of separate embodiments, may also be provided in combination in a single embodiment. Conversely, various features of the disclosure, which are, for brevity, described in the context of a single embodiment, may also be provided separately or in any suitable sub-combination. All combinations of the embodiments pertaining to the disclosure are specifically embraced by the present disclosure and are disclosed herein just as if each and every combination was individually and explicitly disclosed. In addition, all sub-combinations of the various embodiments and elements thereof are also specifically embraced by the present disclosure and are disclosed herein just as if each and every such sub-combination was individually and explicitly disclosed herein.

### Compositions of the Disclosure

[0190] As described in greater detail below, the invention provides, inter alia, compositions of CARs and combinations of CARs that display enhanced efficacy and/or can be used for logic gating to target and eliminate specific cells (e.g., cancer cells) when multiple antigens are present. Furthermore, the CARs and system of CARs described herein allow for reduction of T cell exhaustion in CAR T cells while maintaining their efficacy and potency. In addition, CAR T cell activity can be enhanced when antigen density is limiting. In some embodiments, the invention provides chimeric antigen receptors (CARs) that do not have an immune receptor tyrosine based activation motif (ITAM) in their intracellular signaling domains. In some embodiments, the CARs of the disclosure do not have a CD3zeta (CD3ζ) domain. Also provided are combinations of these chimeric antigen receptors (CARs) (e.g., forming logic AND gates) that only activate cells expressing these CAR combinations when each and every CAR molecule in the combination is activated or binds to the corresponding extracellular ligand or antigen. Also provided are recombinant nucleic acids encoding such CARs or CAR combinations, as well as recombinant cells that have been engineered to express a CAR polypeptide or a combination of CAR polypeptides as disclosed herein and are directed against a cell of interest such as a cancer cell.

### Chimeric Antigen Receptors (Cars)

[0191] As described above, the CAR polypeptides of the present disclosure include (i) an extracellular ligand-binding domain (a.k.a., extracellular antigen-binding domain, or ECD) having a binding affinity for a ligand (or an antigen); (ii) a transmembrane domain (TMD); and (iii) an intracellular signaling domain (a.k.a., cytosolic signaling domain). In some embodiments, binding of the ligand/antigen to the extracellular ligand-binding domain activates the intracellular signaling domain of a CAR polypeptide, either alone or in a combination of CAR polypeptides (e.g., AND gates). In some embodiments, binding of the ligand/antigen to the extracellular ligand-binding domain does not activate the intracellular signaling domain of a CAR polypeptide, when in a combination of CAR polypeptides (e.g., AND gates). However, such binding may be required to activate a cell expressing the combination of CAR polypeptides. For example, a cell expressing two CAR molecules as an AND gate combination may be only activated when the extracellular ligand-binding domains of both CAR molecules bind to their specific ligands. In some embodiments, the CAR polypeptides described herein do not have an immune receptor tyrosine based activation motif (ITAM) in their intracellular signaling domains. In some embodiments, the disclosed CARs have the above listed domains in (i)-(iii) in a N-terminal to C-terminal direction. In some embodiments, the disclosed CARs are described in a format of X—Y—Z, wherein X represents the ligand/antigen recognizable by the extracellular ligand-binding domain, Y represents the hinge/transmembrane (H/TM) domain, and Z represents the intracellular signaling domain. For example, “CD19−CD28H/TM-LAT” refers to a CAR molecule having an extracellular ligand-binding domain which specifically binds to CD19, a CD28 hinge/transmembrane domain, and a LAT intracellular signaling domain. Combinations of CAR molecules follow the same format. For example, “CD19−CD28H/TM-LAT+HER2-CD28H/TM-SLP-76” refers to a CAR combination having two CAR molecules, including one CAR as described above, and another CAR having an extracellular ligand-binding domain which specifically binds to HER2, a CD28 hinge/transmembrane domain, and a SLP-76 intracellular signaling domain.

[0192] In some embodiments, the disclosed CARs further include one or more hinge domains and/or costimulatory domains. Description of these corresponding CAR constructs follows the same format as above, adding the optional hinge and/or costimulatory domain in the correspond place (in N-terminal to C-terminal direction). For example, “HER2-CD28H/TM-CD28-SLP-76” refers to a CAR molecule having an extracellular ligand-binding domain which specifically binds to HER2, a CD28 hinge/transmembrane domain, a CD28 costimulatory domain, and a SLP-76 intracellular signaling domain.

[0193] In some embodiments, the disclosed CARs contain at least one intracellular (i.e., cytosolic) signaling domain described herein, including, but not limiting to, ZAP70, PLCG1, PKC, ITK, NCK, VAV1, GRB2, GADS, SOS1, ADAP, SYK, LYN, PI3K, BLNK, or a biologically active fragment, mutant, or variant thereof. In some embodiments, the disclosed CARs contain more than one intracellular (i.e., cytosolic) signaling domain described herein, including, but not limiting to, ZAP70, PLCG1, PKC, ITK, NCK, VAV1, GRB2, GADS, SOS1, ADAP, SYK, LYN, PI3K, BLNK, or a biologically active fragment, mutant, or variant thereof. Sequences of exemplary intracellular signaling domains are disclosed herein, such as in Tables 1-2 and sequence listing.

### Extracellular Ligand (Antigen)-Binding Domains (ECD)

[0194] A CAR molecule described herein has at least one ECD which has a binding affinity for one or more target ligands (or antigens, which are used interchangeably in the instant application). In some embodiments, the target ligand is expressed on a cell surface, or is otherwise anchored, immobilized, or restrained on a cell surface. Non-limiting examples of suitable ligand types include cell surface receptors, adhesion proteins, carbohydrates, lipids, glycolipids, lipoproteins, and lipopolysaccharides that are surface-bound, integrins, mucins, and lectins. In some embodiments, the ligand is a protein. In some embodiments, the ligand is a carbohydrate. In some embodiments, the ligand is expressed by a target cell (e.g., a cancer/tumor cell). In some embodiments, the ligand is an adaptor molecule specifically recognizing a target cell (e.g., a cancer/tumor cell). In some embodiments, the ligand is a biomarker for a specific disease, disorder, or condition (e.g., a cancer/tumor). Non-limiting examples of suitable ligand include CD19, HER2, ROR1, B7-H3 (CD276), GD2, influenza hemagglutinin (HA), CD22, CD2, CD5, CD6, 4-1BB, FcγR1, and integrins, as well as those described in the below section titled “antigens”.

[0195] In some embodiments, the ECD of the CAR polypeptides disclosed herein includes an antigen-binding moiety that binds to one or more target antigens. In some embodiments, the antigen-binding moiety includes one or more antigen-binding determinants of an antibody or a functional antigen-binding fragment thereof, including, at least, a ligand-binding domain of an antibody, an antigen-binding fragment, an antibody mimetic, a receptor, or a ligand for a targeted receptor. One skilled in the art upon reading the present disclosure can readily understand that the term “functional fragment thereof” or “functional variant thereof” refers to a molecule having quantitative and/or qualitative biological activity in common with the wild-type molecule from which the fragment or variant was derived. For example, a functional fragment or a functional variant of an antibody is one which retains essentially the same ability to bind to the same epitope as the antibody from which the functional fragment or functional variant was derived. For instance, an antibody capable of binding to an epitope of a cell surface receptor may be truncated at the N-terminus and/or C-terminus, and the retention of its epitope binding activity assessed using assays known to those of skill in the art. In some embodiments, the antigen-binding moiety is selected from the group consisting of an antibody, a monoclonal antibody, an antigen-binding fragment (Fab), a nanobody, a diabody, a triabody, a minibody, an F(ab′)₂ fragment, an F(ab)v fragment, a single chain variable fragment (scFv), a single domain antibody (sdAb), a V_{H} domain, a V_{L} domain, an Fv fragment, a VNAR domain, and a VHH domain, or a functional fragment thereof. In some embodiments, the antigen-binding moiety includes a heavy chain variable region and a light chain variable region. In some embodiments, the antigen-binding moiety includes a scFv. In some embodiments, the antibody mimetic is selected from the group consisting of: Affibody molecules, Affilins, Affimers, Alphabodies, Avimers, DARPins, Fynomers, Kunitz domain peptides, Monobodies, nanoCLAMPs, and a biologically active fragment thereof. In some embodiments, the receptor is NKG2D or a biologically active fragment thereof. In some embodiments, the ligand for a targeted receptor is an IL-13 polypeptide, an IL-13 mutein, chlorotoxin, or a biologically active fragment thereof.

[0196] The antigen-binding moiety can include naturally-occurring amino acid sequences or can be engineered, designed, or modified so as to provide desired and/or improved properties, e.g., binding affinity. Generally, the binding affinity of an antibody or an antigen-binding moiety for a target antigen (e.g., CD19 antigen or HER2 antigen) can be calculated by the Scatchard method described by Frankel et al., Mol. Immunol, 16: 101-106, 1979. In some embodiments, binding affinity can be measured by an antigen/antibody dissociation rate. In some embodiments, a high binding affinity can be measured by a competition radioimmunoassay. In some embodiments, binding affinity can be measured by ELISA. In some embodiments, antibody affinity can be measured by flow cytometry. An antibody that “selectively binds” a target antigen (such as CD19 or HER2) is an antibody that binds the target antigen with high affinity and does not significantly bind other unrelated antigens but binds the antigen with high affinity, e.g., with an equilibrium constant (K_{D}) of 100 nM or less, such as 60 nM or less, for example, 30 nM or less, such as, 15 nM or less, or 10 nM or less, or 5 nM or less, or 1 nM or less, or 500 pM or less, or 400 pM or less, or 300 pM or less, or 200 pM or less, or 100 pM or less.

[0197] A skilled artisan can select an ECD based on the desired localization or function of a cell that is genetically modified to express a CAR polypeptide of the present disclosure. For example, a CAR polypeptide with an ECD including an antibody specific for a HER2 antigen can target cells to HER2-expressing breast cancer cells. In some embodiments, the ECD of the CAR polypeptides disclosed herein is capable of binding a tumor-associated antigen (TAA) or a tumor-specific antigen (TSA). A skilled artisan can understand that TAAs include a molecule, such as e.g., protein, present on tumor cells and on normal cells, or on many normal cells, but at much lower concentration than on tumor cells. In contrast, TSAs generally include a molecule, such as e.g., protein which is present on tumor cells but absent from normal cells.

### Antigens

[0198] In the instant application, the terms “ligand(s)” and “antigen(s)” are used interchangeably to mean a target molecule(s) specifically recognized by an extracellular antigen-binding domain of a CAR molecule or a CAR molecule combination described herein. In principle, there are no particular limitations with regard to suitable target antigens. In some embodiments of the disclosure, the antigen-binding moiety of the ECD is specific for an epitope present in an antigen expressed or recognized by a target cell. In some embodiments, the target cell is correlated to a disease or disorder. Exemplary diseases or disorders may include, e.g., proliferative diseases (e.g., cancers), hematological malignancies, solid tumors, autoimmune diseases, inflammations, allergic diseases, infections, senescence/aging, etc. In some embodiments of the disclosure, the antigen-binding moiety of the ECD is specific for an epitope present in an antigen that is expressed by a tumor cell, i.e., a tumor-associated antigen. The tumor-associated antigen can be an antigen associated with, e.g., a leukemia cell, a neublastoma cell, an osteosarcoma cell, a pancreatic cancer cell, a colon cancer cell, an ovarian cancer cell, a prostate cancer cell, a lung cancer cell, mesothelioma cell, a breast cancer cell, a urothelial cancer cell, a liver cancer cell, a head and neck cancer cell, a sarcoma cell, a cervical cancer cell, a stomach cancer cell, a gastric cancer cell, a melanoma cell, a uveal melanoma cell, a cholangiocarcinoma cell, a multiple myeloma cell, a lymphoma cell, a glioblastoma cell, or other cancer cells described in the present disclosure. In some embodiments, the antigen-binding moiety is specific for an epitope present in a tissue-specific antigen. In some embodiments, the antigen-binding moiety is specific for an epitope present in a disease-associated antigen. Tumors often refers to a subgroup of cancers when an uncontrolled growth of cells occurs in solid tissue such as an organ, muscle, or bone. In the instant application, the terms “tumors” and “cancers” are generally used interchangeably to mean cells having an uncontrolled growth, unless specified otherwise.

[0199] In some embodiments, the antigen is selected from the group consisting of CD19, HER2, ROR1, B7-H3 (CD276), influenza hemagglutinin (HA), CD22, CD2, CD5, CD6, 4-1BB, FcγR1, and integrins. In some embodiments, the antigen is selected from the group consisting of CD19, HER2, ROR1, B7-H3 (CD276), influenza hemagglutinin (HA), CD22, CD2, CD5, CD6, 4-1BB, FcγR1, GD2, CD22, CD10, CD20, GPC2, GD3, GM2, GM3, and integrins.

[0200] Non-limiting examples of suitable target antigens also include Glypican 2 (GPC2), human epidermal growth factor receptor 2 (Her2/neu), CD276 (B7-H3), PSMA, IL-13-receptor alpha 1, IL-13-receptor alpha 2, alpha-fetoprotein (AFP), carcinoembryonic antigen (CEA), cancer antigen-125 (CA-125), CA19-9, calretinin, MUC-1, epithelial membrane protein (EMA), epithelial tumor antigen (ETA). Other suitable target antigens include, but are not limited to, tyrosinase, melanoma-associated antigen (MAGE), CD34, CD45, CD123, CD93, CD99, CD117, chromogranin, cytokeratin, desmin, glial fibrillary acidic protein (GFAP), gross cystic disease fluid protein (GCDFP-15), ALK, DLK1, FAP, NY-ESO, WT1, HMB-45 antigen, protein melan-A (melanoma antigen recognized by T lymphocytes; MART-1), myo-D1, muscle-specific actin (MSA), neurofilament, neuron-specific enolase (NSE), placental alkaline phosphatase, synaptophysin, thyroglobulin, thyroid transcription factor-1, CD138, FolR1, LeY, MCSP, and TYRP1.

[0201] Additional antigens that can be suitable for the CARs disclosed herein include, but are not limited to, the dimeric form of the pyruvate kinase isoenzyme type M2 (tumor M2-PK), CD19, CD20, CD5, CD7, CD3, TRBC1, TRBC2, BCMA, CD38, CD123, CD93, CD34, CD1a, SLAMF7/CS1, FLT3, CD33, CD123, TALLA-1, CSPG4, DLL3, Kappa light chain, Lamba light chain, CD16/FcγRIII, CD64, FITC, CD22, CD27, CD30, CD70, GD2 (ganglioside G2), GD3, EGFRvIII (epidermal growth factor variant III), EGFR and isovariants thereof, TEM-8, sperm protein 17 (Sp17), mesothelin. Further non-limiting examples of suitable antigens include PAP (prostatic acid phosphatase), prostate stem cell antigen (PSCA), prostein, NKG2D, TARP (T cell receptor gamma alternate reading frame protein), Trp-p8, STEAP1 (six-transmembrane epithelial antigen of the prostate 1), an abnormal ras protein, an abnormal p53 protein, integrin β3(CD61), galactin, K-Ras (V-Ki-ras2 Kirsten rat sarcoma viral oncogene), and Ral-B. In some embodiments, the antigen is CD19, human epidermal growth factor receptor 2 (Her2/neu), CD276 (B7-H3), or HA.

[0202] Antigens that can be suitable for the CARs disclosed herein include, but are not limited to, one, or any combination thereof, of: CD1a, CD1b, CD1c, CD2, CD3, CD4, CD5, CD6, CD7, CD8, CD9, CD10, CD11a, CD11b, CD11c, CD12, CD13, CD14, CD15 (SSEA-1), CD16 (FcγRIII), CD17, CD18, CD19, CD20, CD21, CD22, CD23, CD24, CD25, CD26, CD27, CD28, CD29, CD30, CD31, CD32 (FcγRII), CD33, CD34, CD35, CD36, CD37, CD38, CD39, CD40, CD41, CD43, CD44, CD44V6, CD45, CD45R/B220, CD45RO, CD49b, CD49d, CD49f, CD52, CD53, CD54, CD56 (NCAM), CD57, CD61 (integrin β3), CD62L, CD63, CD64, CD66b, CD68, CD69, CD70, CD73, CD74, CD79a (Igα), CD79b (Igβ), CD80, CD83, CD85k (ILT3), CD86, CD88, CD93 (C1Rqp), CD94, CD95, CD99, CD103, CD105 (Endoglin), CD107a, CD107b, CD114 (G-CSFR), CD115, CD117, CD122, CD123, CD129, CD133, CD134, CD138 (Syndecan-1), CD141, CD146, CD152 (CTLA-4), CD158 (Kir), CD161 (NK-1.1), CD163, CD183, CD191, CD193 (CCR3), CD194 (CCR4), CD195 (CCR5), CD197 (CCR7), CD203c, CD205 (DEC-205), CD207 (Langerin), CD209 (DC-SIGN), CD223, CD235, CD244 (2B4), CD252 (OX40L), CD267, CD268 (BAFF-R), CD273 (B7-DC, PD-L2), CD276 (B7-H3), CD279 (PD1), CD282 (TLR2), CD284 (TLR4), CD294, CD304 (Neuropilin-1), CD305, CD314 (NKG2D), CD319 (CRACC), CD326, CD328 (Siglec-7), CD335 (NKp46), fetal acetylcholine receptor (AChR), ADGRE2, alpha-fetoprotein (AFP), ALK, BCMA, BDCA3, C3AR, Lewis A (CA19.9), carbonic anhydrase IX (CA1X), calretinin, cancer antigen-125 (CA-125), CCR1, CCR4, CDS, carcinoembryonic antigen (CEA), chromogranin, CLEC12A, an antigen of a cytomegalovirus (CMV) infected cell (e.g., a cell surface antigen), CS-1, CSPG4, cytokeratin, desmin, DLK1, DLL3, EGFRvIII (epidermal growth factor variant III), EGFR and isovariants thereof, epithelial cell adhesion molecule (EpCAM), epithelial glycoprotein2 (EGP 2), epithelial glycoprotein-40 (EGP-40), epithelial membrane protein (EMA), ERBB, epithelial tumor antigen (ETA), FAP, folate-binding protein (FBP), FcγR1, FcεRIα, FITC, FLT3, FOLR1, FOLR3, galactin, ganlgiosides, gross cystic disease fluid protein (GCDFP-15), GD2 (ganglioside G2), GD3, GM2, GM3, glial fibrillary acidic protein (GFAP), gpA33, glycopeptides, Glypican 2 (GPC2), oncofetal antigen (h5T4), influenza hemagglutinin (HA), human epidermal growth factor receptor 2 (Her2/neu), HLA-DR, HM1.24, HMB-45 antigen, HPV E6, HPV E7, ICAM-1, IgG, IgD, IgE, IgM, IL-13-receptor alpha 1, integrins, Integrin B7, Interleukin-13 receptor subunit alpha-2 (IL-13Rα2), Kappa light chain, kinase insert domain receptor (KDR), Lamba light chain, LILRB2, Lewis Y (LeY), LGR5, Ly49, Ly108, L1 cell adhesion molecule (L1-CAM), melanoma-associated antigen (MAGE), melanoma antigen family A 1 (MAGE-A1), protein melan-A (melanoma antigen recognized by T lymphocytes; MART-1), MCSP, c-Met, MICA/B, mesothelin, muscle-specific actin (MSA), Mesothelin (MSLN), the dimeric form of the pyruvate kinase isoenzyme type M2 (tumor M2-PK), Mucin 1 (Muc-1), Mucin 16 (Muc-16), myo-D1, Necl-2, neurofilament, NKCSI, NKG2D, neuron-specific enolase (NSE), NY-ESO, cancer-testis antigen NY-ESO-1, an abnormal p53 protein, PAP (prostatic acid phosphatase), PAMA, P-cadherin, placental alkaline phosphatase, PRAIVIE, prostein, prostate stem cell antigen (PSCA), prostate-specific membrane antigen (PSMA), Ral-B, K-Ras (V-Ki-ras2 Kirsten rat sarcoma viral oncogene), an abnormal ras protein, ROR1, SLAMF7/CS1, receptor tyrosine-protein kinases erb-B2,3,4, sperm protein 17 (Sp17), STEAP1 (six-transmembrane epithelial antigen of the prostate 1), synaptophysin, tumor-associated glycoprotein 72 (TAG-72), TALLA-1, TARP (T cell receptor gamma alternate reading frame protein), TEM-8, human telomerase reverse transcriptase (hTERT), TIM-3, TLR4, TRBC1, TRBC2, Trp-p8, thyroglobulin, thyroid transcription factor-1, TYRP1, tyrosinase, vascular endothelial growth factor R2 (VEGF-R2), Vα24, Wilms tumor protein (WT-1), and various pathogen antigen known in the art. In some embodiments, an antigen described herein is a tumor-specific antigen (TSA) or a tumor-associated antigen (TAA).

[0203] In some embodiments, the CAR polypeptides disclosed herein include an ECD including an antigen-binding moiety that binds CD19. In some embodiments, the CAR polypeptides disclosed herein include an ECD including an antigen-binding moiety that binds HER2. In some embodiments, the CAR polypeptides disclosed herein include an ECD including an antigen-binding moiety that binds B7-H3. In some embodiments, the CAR polypeptides disclosed herein include an ECD including an antigen-binding moiety that binds HA. In some embodiments, the CAR polypeptides disclosed herein include an ECD including an antigen-binding moiety that binds CD22. In some embodiments, the CAR polypeptides disclosed herein include an ECD including an antigen-binding moiety that binds CD2. In some embodiments, the CAR polypeptides disclosed herein include an ECD including an antigen-binding moiety that binds CD5. In some embodiments, the CAR polypeptides disclosed herein include an ECD including an antigen-binding moiety that binds CD6. In some embodiments, the CAR polypeptides disclosed herein include an ECD including an antigen-binding moiety that binds 4-1BB. In some embodiments, the CAR polypeptides disclosed herein include an ECD including an antigen-binding moiety that binds FcγR1. In some embodiments, the CAR polypeptides disclosed herein include an ECD including an antigen-binding moiety having an amino acid sequence exhibiting at least 50% sequence identity to any one of SEQ ID NOs: 1-5, 161 and 197. In some embodiments, the antigen-binding moiety has an amino acid sequence exhibiting at least 50%, at least 60%, at least 70%, at least 80%, at least 85%, at least 90%, at least 95%, at least 96%, at least 97%, at least 98%, at least 99%, or 100% sequence identity to any one of SEQ ID NOs: 1-5, 161 and 197. The percent identity as used herein refers to two or more sequences or subsequences that are the same or have a specified percentage of nucleotides or amino acids that are the same over a specified region. The two or more sequences or subsequences may be compared and aligned for maximum correspondence over a comparison window or designated region, as measured by, e.g., a BLAST or BLAST 2.0 sequence comparison algorithms, or by manual alignment and visual inspection. See e.g., the NCBI web site at ncbi.nlm.nih.gov/BLAST. This definition also refers to, or may be applied to, the complement of a sequence. This definition also includes sequences that have deletions and/or additions, as well as those that have substitutions. Sequence identity can be calculated using published techniques and widely available computer programs, such as the GCS program package (Devereux et al, Nucleic Acids Res. 12:387, 1984), BLASTP, BLASTN, FASTA (Atschul et al., J Mol Biol 215:403, 1990). Sequence identity can be measured using sequence analysis software such as the Sequence Analysis Software Package of the Genetics Computer Group at the University of Wisconsin Biotechnology Center (1710 University Avenue, Madison, Wis. 53705), with the default parameters thereof. The amino acid substitution(s) may be a conservative amino acid substitution, for example at a non-essential amino acid residue in the CDR sequence(s). A “conservative amino acid substitution” is understood to be one in which the original amino acid residue is substituted with an amino acid residue having a similar side chain. Families of amino acid residues having similar side chains are known in the art. These families include amino acids with basic side chains (e.g., lysine, arginine, histidine), acidic side chains (e.g., aspartic acid, glutamic acid), uncharged polar side chains (e.g., glycine, asparagine, glutamine, serine, threonine, tyrosine, cysteine), non-polar side chains (e.g., alanine, valine, leucine, isoleucine, proline, phenylalanine, methionine, tryptophan), beta-branched side chains (e.g., threonine, valine, isoleucine) and aromatic side chains (e.g., tyrosine, phenylalanine, tryptophan, histidine). Sequences of exemplary ECDs are disclosed herein, such as in Tables 1-2 and sequence listing.

### Hinge Domains

[0204] As described above, the CAR polypeptides described herein may have an optional hinge domain. Within a chimeric antigen receptor, the term “hinge domain” generally refers to a flexible polypeptide connector region disposed between the targeting moiety (ECD) and the TMD. These sequences are generally derived from IgG subclasses (such as IgG1 and IgG4), IgD and CD8 domains, of which IgG1 has been most extensively used.

[0205] In some embodiments, the hinge domain provides structural flexibility to flanking polypeptide regions. The hinge domain may consist of natural or synthetic polypeptides. In recent years, several studies of the hinge domain mainly focused on the following aspects: (1) reducing binding affinity to the Fcγ receptor, thereby eliminating certain types of off-target activation; (2) enhancing the single-chain variable fragment (scFv) flexibility, thereby relieving the spatial constraints between particular epitopes targeted on tumor antigens and the CAR's antigen-targeting moiety; (3) reducing the distance between an scFv and the target epitope(s); and (4) facilitating the detection of CAR expression using anti-Fc reagents. Nevertheless, the influences of the hinge domain on CAR T cell physiology are not well understood.

[0206] It can be appreciated by those skilled in the art that hinge domains may improve the function of the CAR polypeptides described herein by promoting optimal positioning of the antigen-binding moiety in relationship to the portion of the antigen recognized by the same. It can be appreciated that, in some embodiments, the hinge domain may not be required for optimal CAR activity. In some embodiments, a beneficial hinge domain having a short sequence of amino acids promotes CAR activity by facilitating antigen binding by, e.g., relieving any steric constraints that may otherwise alter antibody binding kinetics. The sequence encoding the hinge domain may be positioned between the antigen recognition moiety and the TMD. In some embodiments, the hinge domain is operably linked downstream of the antigen-binding moiety and upstream of the TMD. In case a CAR polypeptide described herein has an optional hinge domain, the format to describe the hinge domain and the TMD domain may be “H/TM” or “H-TM”. For example, CD19-CD28H/TM-LAT or CD19−CD28H-TM-LAT represents the same CAR molecule having a CD28 hinge domain and a CD28 transmembrane domain (TMD), while IgG4H/CD4TM represents a CAR molecule having a hinge domain derived from IgG4 or including an IgG4 hinge domain.

[0207] The hinge sequence can generally be any moiety or sequence derived or obtained from any suitable molecule. For example, in some embodiments, the hinge sequence can be derived from the human CD8 molecule or a CD28 molecule and any other receptors that provide a similar function in providing flexibility to flanking regions. The hinge domain can have a length of from about 4 amino acid (aa) to about 50 aa, e.g., from about 4 aa to about 10 aa, from about 10 aa to about 15 aa, from about aa to about 20 aa, from about 20 aa to about 25 aa, from about 25 aa to about 30 aa, from about 30 aa to about 40 aa, or from about 40 aa to about 50 aa. Suitable hinge domains can be readily selected and can be of any of a number of suitable lengths, such as from 1 amino acid (e.g., Gly) to 20 aa, from 2 aa to 15 aa, from 3 aa to 12 aa, including 4 aa to 10 aa, 5 aa to 9 aa, 6 aa to 8 aa, or 7 aa to 8 aa, and can be 1, 2, 3, 4, 5, 6, or 7 aa. Non-limiting examples of suitable hinge domains include a CD8 hinge domain, a CD28 hinge domain, a CD4 hinge domain, a PD-1 hinge domain, a CD2 hinge domain, a CTLA4 hinge domain, or an IgG4 hinge domain. In some embodiments, the hinge domain can include regions derived from a human CD8α (a.k.a. CD8a) molecule or a CD28 molecule and any other receptors that provide a similar function in providing flexibility to flanking regions. Additional exemplary hinge domains derive from or include hinge domains of LFA-1 (CD11a/CD18), CD5, CD27 (TNFRSF7), CD70, 4-1BB, OX40 (CD134), ICOS (CD278), IgG1 Fc region, IgG2 Fc region, IgG3 Fc region, IgG4 Fc region, IgE Fc region, IgM Fc region, IgA Fc region, or a combination thereof. In some embodiments, the CAR disclosed herein includes a hinge domain derived from a CD8 hinge domain. In some embodiments, the hinge domain can include one or more copies of the CD8 hinge domain. In some embodiments, the CAR disclosed herein includes a hinge domain derived from a CD28 hinge domain. In some embodiments, the hinge domain can include one or more copies of the CD28 hinge domain. In some embodiments, the CAR disclosed herein includes a hinge domain derived from a CD4 hinge domain. In some embodiments, the hinge domain includes one or more copies of the CD4 hinge domain. In some embodiments, the CAR disclosed herein includes a hinge domain derived from an IgG4 hinge domain. In some embodiments, the hinge domain can include one or more copies of the IgG4 hinge domain.

### Costimulatory Domains

[0208] As described above, the CAR polypeptides described herein may have an optional costimulatory domain. Generally, the costimulatory domain suitable for the CAR polypeptides disclosed herein can be any one of the costimulatory domains known in the art. Examples of suitable costimulatory domains that can enhance cytokine production and include, but are not limited to, costimulatory polypeptide sequences derived from 4-1BB (CD137), CD27, CD28, OX40 (CD134), and costimulatory inducible T-cell co-stimulator (ICOS) polypeptide sequences. Additional exemplary costimulatory polypeptide sequences may be or be derived from a costimulatory domain of: CD28, ICOS (CD278), CD27, 4-1BB (CD137), OX40 (CD134), CD2, CD4, CD5, CD7, CD8, CD8α, CD8β, CD11a, CD11b, CD11c, CD11d, CD18, CD19, CD19a, CD29, CD30, CD30L, CD40, CD40L (CD154), CD48, CD49a, CD49D, CD49f, CD58, CD53, ICAM-1 (CD54), CD69, CD70, CD80 (B7-1), CD82, CD83, CD84, CD86 (B7-2), CD90, CD96, CD100, CD103, CD122, CD132, CD150 (SLAMF1), CD160 (BY55), CD162 (DNAM1), CD223 (LAG3), CD226, CD229, CD244, CD270 (HVEM), CD273 (PD-L2), CD274 (PD-L1), CD278, LAT, lymphocyte function-associated antigen-1 (LFA-1), LIGHT, NKG2C, NKG2D, NKp30, NKp44, NKp46, NKp80 (KLRF1), B7-H2, B7-H3, CD83 ligand, PD-1, SLP-76, Toll-like receptors (TLRs, such as TLR2), DAP10, DAP12, LAG-3, 2B4, CARD1, CTLA-4 (CD152), TRIM, ZAP70, FcERIγ, 4-1BBL, BAFF, GADS, GITR, GITR-L, BAFF-R, HVEM, CD27L, OX40L, TAC1, BLAME, CRACC, CD2F-10, NTB-A, integrin α4, integrin α4β1, integrin α4β7, IA4, ICAM-1, IL2Rβ, IL2Rγ, IL7Rα, ITGA4, ITGA6, ITGAD, ITGAE, ITGAL, ITGAM, ITGAX, ITGB1, ITGB2, ITGB7, KIRDS2, LTBR, PAG/Cbp, PSGL1, SLAMF6 (NTB-A, Ly108), SLAMF7, SLP-76, TNFR2, TRANCE/RANKL, VLA1, VLA-6, BTLA, ikaros, LAG-3, LMIR, CEACAM1, CRTAM, TCL1A, DAP12, TIM-1, Dectin-1, PDCD6, PD-1, TIM-4, TSLP, EphB6, TSLP-R, HLA-DR, or any combination thereof.

[0209] Accordingly, in some embodiments, the costimulatory domain of the CARs disclosed herein is selected from the group consisting of a costimulatory 4-1BB (CD137) polypeptide sequence, a costimulatory CD27 polypeptide sequence, a costimulatory CD28 polypeptide sequence, a costimulatory OX40 (CD134) polypeptide sequence, and a costimulatory inducible T-cell co-stimulator (ICOS) polypeptide sequence. In some embodiments, the CARs disclosed herein include a costimulatory domain derived from a costimulatory 4-1BB (CD137) polypeptide sequence. In some embodiments, the CARs disclosed herein include a costimulatory 4-1BB (CD137) polypeptide sequence. In some embodiments, the CARs disclosed herein include a costimulatory domain derived from a costimulatory CD28 polypeptide sequence. In some embodiments, the CARs disclosed herein include a costimulatory CD28 polypeptide sequence. In some embodiments, the CARs disclosed herein include a costimulatory domain having an amino acid sequence exhibiting at least 50% sequence identity to the sequence of SEQ ID NO: 146 or 147. In some embodiments, the costimulatory domain has an amino acid sequence exhibiting at least 50%, at least 60%, at least 70%, at least 80%, at least 85%, at least 90%, at least 95%, at least 96%, at least 97%, at least 98%, at least 99%, or 100% sequence identity to the sequence of SEQ ID NO: 146 or 147.

### Transmembrane Domains (TMD)

[0210] Generally, the transmembrane domain (also referred to as transmembrane region) suitable for the CAR polypeptides disclosed herein can be any one of the TMDs known in the art. Without being bound to theory, it is believed that the TMD traverses the cell membrane, anchors the CAR to the cell surface, and connects the ECD to the intracellular signaling domain, thus impacting expression of the CAR on the cell surface. Examples of suitable TMDs include, but are not limited to, a CD28 TMD, a CD8 TMD, a CD4 TMD, a CD3 TMD, a CTLA-4 TMD, an OX40 TMD, a 4-1BB TMD, a CD2 TMD, and a PD-1 TMD. Additional exemplary TMDs include TMDs from CD3D, CD3E, CD3G, CD3zeta, CD8a, CD8b, CD16, CD25, CD27, CD40, CD79A, CD79B, CD80, CD84, CD86, CD95, CD150 (SLAMF1), CD166, CD200R, CD223 (LAG3), CD270 (HVEM), CD272 (BTLA), CD273 (PD-L2), CD274 (PD-L1), CD278 (ICOS), CD300, CD357 (GITR), A2aR, ICAM-1, 2B4, BTLA, DAP10, FcRα, FcRβ, Fyn, GAL9, IL7, IL12, IL15, KIR, KIR2DL4, KIR2DS1, LAG-3, Lck, LAT, LPA5, LRP, NKp30, NKp44, NKp46, NKG2C, NKG2D, NOTCH1, NOTCH2, NOTCH3, NOTCH4, PTCH2, ROR2, Ryk, SLP-76, SIRPα, pTα, T cell receptor polypeptides (e.g., TCRα and TCRβ), TIM3, TRIM, and ZAP70. Accordingly, in some embodiments, the TMD is derived from a CD28 TMD, a CD8 TMD, a CD4 TMD, a CD3 TMD, a CTLA4 TMD, an OX40 TMD, a 4-1BB TMD, a CD2 TMD, and a PD-1 TMD. In some embodiments, the TMD includes a CD28 TMD, a CD4 TMD, a CD8 TMD, a CD3 TMD, a CTLA4 TMD, an OX40 TMD, a 4-1BB TMD, a CD2 TMD, and a PD-1 TMD. In some embodiments, the CAR disclosed herein include a TMD derived from a CD8. In some embodiments, the CAR polypeptides disclosed herein include a CD8 TMD. In some embodiments, the CAR disclosed herein include a TMD derived from a CD28. In some embodiments, the CAR disclosed herein include a CD28 TMD. In some embodiments, the CAR disclosed herein include a TMD derived from a CD4. In some embodiments, the CAR disclosed herein include a CD4 TMD.

[0211] Exemplary CAR molecules as described herein contain a hinge domain and a TMD domain adjacent to each other. Sequences are disclosed herein for exemplary hinge/transmembrane (H/TM or hinge/TM) domains for various CAR molecules. In some embodiments, a CAR molecule disclosed herein includes an H/TM domain having an amino acid sequence exhibiting at least 50% sequence identity to any one of SEQ ID NOs: 6-10 and 102. In some embodiments, a CAR molecule disclosed herein includes an H/TM domain having an amino acid sequence exhibiting at least 50%, at least 60%, at least 70%, at least 80%, at least 85%, at least 90%, at least 95%, at least 96%, at least 97%, at least 98%, at least 99%, or 100% sequence identity to any one of SEQ ID NOs: 6-10 and 102.

### Extracellular Spacer

[0212] The CARs disclosed herein may further include an optional extracellular spacer domain including one or more intervening amino acid residues that are positioned between the ECD and an optional hinge domain. In some embodiments, the extracellular spacer domain is operably linked downstream to the ECD and upstream to an optional hinge domain. In principle, there are no particular limitations to the length and/or amino acid composition of the extracellular spacer. In some embodiments, any arbitrary single-chain peptide including about one to 100 amino acid residues (e.g., 2, 3, 4, 5, 6, 7, 8, 9, 10, 11, 12, 13, 14, 15, 16, 17, 18, 19, 20, etc. amino acid residues) can be used as an extracellular spacer. In some embodiments, the extracellular spacer includes about 5 to 50, about 10 to 60, about 20 to 70, about 30 to 80, about 40 to 90, about 50 to 100, about 60 to 80, about 70 to 100, about 30 to 60, about 20 to 80, about 30 to 90 amino acid residues. In some embodiments, the extracellular spacer includes about 1 to 10, about 5 to 15, about 10 to 20, about 15 to 25, about 20 to 40, about 30 to 50, about 40 to 60, about 50 to 70 amino acid residues. In some embodiments, the extracellular spacer includes about 40 to 70, about 50 to 80, about 60 to 80, about 70 to 90, or about 80 to 100 amino acid residues. In some embodiments, the extracellular spacer includes about 1 to 10, about 5 to 15, about 10 to 20, about 15 to 25 amino acid residues. In some embodiments, the length and amino acid composition of the extracellular spacer can be optimized to vary the orientation and/or proximity of the ECD and an optional hinge domain to one another to achieve a desired activity of the CARs. In some embodiments, the orientation and/or proximity of the ECD and an optional hinge domain to one another can be varied and/or optimized as a “tuning” tool or effect that would enhance or reduce the efficacy of the CARs. In some embodiments, the orientation and/or proximity of the ECD and an optional hinge domain to one another can be varied and/or optimized to create fully functional or partially functional versions of the CARs. In some embodiments, the extracellular spacer domain includes an amino acid sequence corresponding to an IgG4 hinge domain and an IgG4 CH2-CH3 domain. Additional exemplary extracellular spacer domains may derive from or include an immunoglobulin hinge region (e.g., IgG1, IgG2, IgG3, IgG4, IgA, IgD), all or a portion of an immunoglobulin Fc domain (e.g., a CH1 domain, a CH2 domain, a CH3 domain, or combinations thereof), a stalk region of a type II C-lectin (the extracellular domain located between the C-type lectin domain and the transmembrane domain). Type II C-lectins include, e.g., CD23, CD69, CD72, CD94, NKG2A, and NKG2D. In yet further embodiments, an extracellular spacer domain may be derived from or include a toll-like receptor (TLR) juxtamembrane domain. A TLR juxtamembrane domain contains acidic amino acids lying between the leucine rich repeats (LRRs) and the transmembrane domain of a TLR. In certain embodiments, a TLR juxtamembrane domain is a TLR1, TLR2, TLR3, TLR4, TLR5, TLR6, TLR7, TLR8, or TLR9 juxtamembrane domain.

[0213] In some embodiments, the CAR polypeptide has an amino acid sequence having at least 50% sequence identity to any one of SEQ ID NOs: 27-49, 111-123, 148-151, 162, 164, 166, 168, 170-176, 178, 180-184, 186, 187, 189, 190, 192, 194, 196, and 198-204. In some embodiments, the CAR polypeptide has an amino acid sequence having at least 50%, at least 60%, at least 70%, at least 80%, at least 85%, at least 90%, at least 95% sequence identity to any one of SEQ ID NOs: 27-49, 111-123, 148-151, 162, 164, 166, 168, 170-176, 178, 180-184, 186, 187, 189, 190, 192, 194, 196, and 198-204. In some embodiments, the CAR polypeptide has an amino acid sequence having at least 95%, at least 96%, at least 97%, at least 98%, at least 99% sequence identity to any one of SEQ ID NOs: 27-49, 111-123, 148-151, 162, 164, 166, 168, 170-176, 178, 180-184, 186, 187, 189, 190, 192, 194, 196, and 198-204. In some embodiments, the CAR polypeptide has an amino acid sequence having 100% sequence identity to any one of SEQ ID NOs: 27-49, 111-123, 148-151, 162, 164, 166, 168, 170-176, 178, 180-184, 186, 187, 189, 190, 192, 194, 196, and 198-204.

[0214] One skilled in the art can appreciate that the complete amino acid sequence of a CAR polypeptide of the disclosure can be used to construct a back-translated gene. For example, a DNA oligomer containing a nucleotide sequence coding for a given CAR can be synthesized. For example, several small oligonucleotides coding for portions of the desired CAR or antibody can be synthesized and then ligated. The individual oligonucleotides typically contain 5′ or 3′ overhangs for complementary assembly.

[0215] In addition to generating desired CARs via expression of nucleic acid molecules that have been altered by recombinant molecular biological techniques, a subject CAR in accordance with the present disclosure can be chemically synthesized. Chemically synthesized polypeptides are routinely generated by those of skill in the art.

[0216] Once assembled (by synthesis, recombinant methodologies, site-directed mutagenesis or other suitable techniques), the DNA sequences encoding a CAR as disclosed herein can be inserted into an expression vector and operably linked to an expression control sequence appropriate for expression of the CAR in the desired transformed host. Proper assembly can be confirmed by nucleotide sequencing, restriction mapping, and expression of a biologically active polypeptide in a suitable host. As is known in the art, in order to obtain high expression levels of a transfected gene in a host, take should be taken to ensure that the gene is operably linked to transcriptional and translational expression control sequences that are functional in the chosen expression host.

### Combinations of Chimeric Antigen Receptors (CARS) (Logic “And” Gates)

[0217] As described above, the CAR polypeptides of the present disclosure can be combined to form Boolean logic gates (e.g. AND) to response to a combination of extracellular ligands/antigens. In one aspect, provide herein is a composition having at least two CAR polypeptides of the CAR polypeptides described herein. The CAR combinations described herein, e.g., forming logic gatings, are capable of activating cells (e.g., T cells) expressing the CAR combinations to, e.g., kill target cells and respond only when multiple target antigens are present. The CAR combinations described herein may also reduce T cell exhaustion in CAR T cells while maintaining efficacy/potency. Furthermore, the CAR combinations described herein may enhance activity of the cells (e.g., T cells) expressing the CAR combinations when antigen density is limiting. In some embodiments, at least one CAR molecule of the CAR combinations has an intracellular signaling domain without an ITAM (e.g., without a CD3zeta domain). For example, the at least two CAR polypeptides in a CAR combination may have: 1) a first chimeric antigen receptor (CAR) polypeptide having: a first extracellular ligand-binding domain having a binding affinity for a first ligand; a first transmembrane domain; and a first intracellular signaling domain, and 2) a second chimeric antigen receptor (CAR) polypeptide having: a second extracellular ligand-binding domain having a binding affinity for a second ligand different from the first ligand; a second transmembrane domain; and a second intracellular signaling domain, wherein a cell expressing both CAR polypeptides is activated only when the first and the second extracellular ligand-binding domains bind to the first and the second ligand, respectively, and wherein neither of the first and the second intracellular signaling domains has an ITAM (e.g., neither having CD3zeta).

[0218] To form an “AND” gate CAR molecule combination, each of the CAR molecules, when binding to the corresponding ligand/antigen, is not able to activate, by itself, the cell expressing the composition of the CAR combination. Instead, the cell can be activated only when each and every CAR molecule in the “AND” gate combination are activated or bind to their specific ligands. In some embodiments, the intracellular signaling domains of the CAR molecules in the “AND” gate combination, when activated, interact with each other to produce a signaling to activate the cell. An “AND” gate CAR molecule combination can be evaluated based on its potency and specificity. For example, potency represents the degree/level of cell activation induced by a CAR combination after binding to extracellular antigens (i.e., activation of each and every CAR molecule in the combination), while specificity represents the ratio of such degree/level of activation to a background degree/level of cell activation when some but not all of CAR molecules in the combination bind to the corresponding antigen(s). As illustrated in the Examples described herein, different CAR combinations are compared to find combinations with a highest potency in response to a full panel of antigens (e.g., able to activate each and every CAR molecule in the combination) and with a highest specificity (i.e., least “leaky” in response to less than the corresponding full panel of antigens so that not all CAR molecules are activated).

[0219] In some embodiments, at least one of the first and the second intracellular signaling domains is a full-length or biologically active fragment of a protein kinase, a G protein, a GTP-binding protein, an adaptor signaling protein, or a scaffold protein capable of inducing cell activation. In some embodiments, at least one of the first and the second intracellular signaling domains is selected from the group consisting of: LAT, SLP-76, CD28, CD2, 4-1BB, CD6, and a biologically active fragment, mutant or variant thereof. In some embodiments, at least one of the first and the second intracellular signaling domains is LAT or SLP-76, or a biologically active fragment, mutant or variant thereof. In some embodiments, the first intracellular signaling domain is LAT or a biologically active fragment, mutant or variant thereof and the second intracellular signaling domain is SLP-76 or a biologically active fragment, mutant or variant thereof. In some embodiments, the first intracellular signaling domain is LAT or a biologically active fragment, mutant or variant thereof and the second intracellular signaling domain is CD28 or a biologically active fragment, mutant or variant thereof.

[0220] In some embodiments, CARs in the “AND” gate combination have a same TMD domain, a same optional hinge domain, and/or a same optional costimulatory domain. In some embodiments, CARs in the “AND” gate combination have different TMD domains, optional hinge domains, and/or optional costimulatory domains. For example, different domains, as described herein, may be used for the CARs in the “AND” gate combination to reduce aggregation of the CARs, to modulate the potency and/or the specificity (i.e., the “leakiness”) of the CAR combination, and/or to reduce T cell exhaustion. Sequences of exemplary CARs with a same or different hinge/TM domains are disclosed herein, such as in Tables 1-2 and sequence listing.

### Mutations to Chimeric Antigen Receptors (CARS)

[0221] Multiple mutations can be introduced to the CAR polypeptides of the present disclosure, either used alone or in “AND” gate combinations. Mutations include, at least, substitution, deletion, insertion, or other methods known in the art. The purpose of mutations may include, for example, to enhance the potency of the CAR polypeptide (or the CAR polypeptide combination), to enhance the stability (e.g., half-life) of the CAR polypeptide, to enhance the expression of the CAR polypeptide, to enhance the solubility and/or to reduce aggregation of the CAR polypeptide, to manipulate modifications of the CAR polypeptide during expression, to manipulate binding of the CAR polypeptide to its binding partner(s), to enhance the purification of the CAR polypeptide, to reduce ubiquitination and/or degradation of the CAR polypeptide, to reduce the background activation levels of the cell (i.e., the “leakiness”) when some but not all CAR polypeptides in an “AND” gate combination are activated, to reduce aggregation of the multiple CAR polypeptides in an “AND” gate combination in absence of the ligand, etc.

[0222] Mutations and deletions may be introduced into at least one domain of the CAR polypeptide. For example, mutations and deletions may include at least one of
[0223] i) a mutation of G160D, Y200F, Y220F, Y252F, Y200F/Y220F, or Y200F/Y220F/Y252F, a deletion of amino acid residues at the C terminus (e.g., positions 200-262), a deletion of amino acid residues at positions 28-90 and at positions 200-262, or a deletion of amino acid residues at positions 28-130 and at positions 200-262, corresponding to the wild-type LAT sequence;
[0224] ii) a mutation of K30R, a deletion of amino acid residues (e.g., positions 224-244), a deletion of amino acid residues at positions 224-265, a deletion of amino acid residues at positions 224-300, or a deletion of amino acid residues at positions 1-81 and at positions 224-244, corresponding to the wild-type SLP-76 sequence;
[0225] iii) at least one mutation in a region on the first and/or the second CAR polypeptide (or each of the CAR polypeptide in an “AND” gate combination) capable of binding to GADS and/or GRB2. Exemplary mutations or deletions for reducing binding to GADS and/or GRB2 include Y200F/Y220F or Y200F/Y220F/Y252F on LAT or deletions such as 4(200-262) on LAT (i.e., a deletion of amino acid residues from position 200 to position 262 of LAT; also as LAT^{200-262 del}) or Δ(224-244) on SLP-76 (also as SLP-76^{224-244 del}); and
[0226] iv) at least one deletion of a region on the first and/or the second CAR polypeptide (or each of the CAR polypeptide in an “AND” gate combination) capable of reducing the resulting packaging size of the CAR polypeptide in, e.g., expression vectors (such as viral vectors) without significantly losing its capacity to activate cells expressing such CAR polypeptide. For example, some deletions may be introduced to ZAP70, LAT, and/or SLP-76 domains in the CAR constructs described herein, in order to reduce the construct size and the resulting packaging size into expression vectors (e.g., viral vectors), without a significant loss of activity. Some exemplary deletions include: a deletion of amino acid residues at positions 28-90 or 28-130 of LAT, a deletion of amino acid residues at positions 1-81, 224-265, and/or 224-300 of SLP-76, and a deletion of other portions of ZAP70, keeping only the amino acids at positions 280-600 or 308-600 of ZAP70 in the CAR constructs. Besides the intracellular signaling domain, various mutations may be introduced into other domains for a CAR molecule, such as the hinge/TM domain (e.g., as in an exemplary CD28H/TM^{2CA} mutation described herein). In some embodiments, a CAR polypeptide described herein contains at least one deletion which reduces the length of a domain of the CAR polypeptide or the full CAR polypeptide, and/or the final packaging size of the CAR polypeptide in an expression vector (e.g., a viral vector) to at most 95%, 94%, 93%, 92%, 91%, 90%, 85%, 80%, 75%, 70%, 65%, 60%, 55%, 50%, 45%, 40%, 35%, 30%, 25%, 20%, 15%, 10%, or less. In some embodiments, the reduction of packaging size for a CAR molecule may increase the transduction efficiency of the CAR molecule into cells at least 10%, 15%, 20%, 25%, 30%, 35%, 40%, 45%, 50%, 55%, 60%, 65%, 70%, 75%, 80%, 85%, 90%, 95%, 100%, 150%, 200%, 250%, 300%, 400%, 500%, 1000%, 1500%, 2000%, 3000%, 5000%, 10000%, or more than the CAR molecule without the at least one deletion or mutation. In some embodiments, a CAR polypeptide described herein contains at least one deletion or other mutation described herein and maintains at least 10%, 15%, 20%, 25%, 30%, 35%, 40%, 45%, 50%, 55%, 60%, 65%, 70%, 75%, 80%, 85%, 90%, 91%, 92%, 93%, 94%, 95%, 96%, 97%, 98%, 99%, or 100% of its activity (e.g., its capacity to activate cells upon antigen exposure). In some embodiments, a CAR polypeptide described herein contains at least one deletion or other mutation described herein and has at least 10%, 20%, 25%, 30%, 35%, 40%, 45%, 50%, 55%, 60%, 65%, 70%, 75%, 80%, 85%, 90%, 95%, 100%, 150%, 200%, 250%, 300%, 400%, 500%, 1000%, 1500%, 2000%, 3000%, 5000%, 10000%, or more activity (e.g., its capacity to activate cells upon antigen exposure) than the CAR molecule without the at least one deletion or mutation.

[0227] Additional exemplary mutations, such as those to CAR molecules containing a truncated ZAP70 fragment, may be found in the present disclosure, such as Examples and Tables 1-2 and sequence listing. Various mutations and deletions, as described herein, can be combined to prepare CAR constructs, performed by a skilled artisan based on the instant description and common knowledge in the art, exemplified by those sequences in Examples and Tables 1-2 and sequence listing.

### Cells Expressing the CAR Polypeptides

[0228] The CAR polypeptides (alone or in “AND” gate combinations), when expressed in a host cell, are capable of activating the cell upon binding to the corresponding ligand(s)/antigen(s). In principle, there are no particular limitations with regard to suitable cells for expressing and activation by the CAR polypeptides. In some embodiments, the cell is an immune cell. For example, the immune cell may include, at least, a T cell, a regulatory T cell (Treg), a natural killer (NK) cell, a stem cell, a monocyte, a gamma delta T cell, a monocyte, a macrophage, a natural killer T (NKT) cell, or an iPSC-derived T cell. In some embodiments, the cell is a non-immune cell. The cells may be any type of natural or artificial cells and/or of any origins. By expressing the CAR polypeptides (alone or in “AND” gate combinations) described herein in these cells, an exemplary manipulating mechanism is introduced so that the cells may be activated and such activation may be detected. Thus, any type of cells that people want to study the activation may be used for expressing the CAR polypeptide described herein.

### Nucleic Acid Molecules

[0229] In one aspect, provided herein are various nucleic acid molecules including nucleotide sequences encoding a CAR polypeptide of the disclosure, including expression cassettes, and expression vectors containing these nucleic acid molecules operably linked to heterologous nucleic acid sequences such as, for example, regulator sequences which allow in vivo expression of the CAR polypeptide in a host cell or ex-vivo cell-free expression system.

[0230] Nucleic acid molecules of the present disclosure can be nucleic acid molecules of any length, including nucleic acid molecules that are generally between about 0.5 Kb and about 50 Kb, for example between about 0.5 Kb and about 20 Kb, between about 1 Kb and about 15 Kb, between about 2 Kb and about 10 Kb, or between about 5 Kb and about 25 Kb, for example between about 10 Kb to 15 Kb, between about 15 Kb and about 20 Kb, between about 5 Kb and about 20 Kb, about 5 Kb and about 10 Kb, or about 10 Kb and about 25 Kb. In some embodiments, the nucleic acid molecules of the disclosure are between about 1.5 Kb and about 50 Kb, between about 5 Kb and about 40 Kb, between about 5 Kb and about 30 Kb, between about 5 Kb and about 20 Kb, or between about 10 Kb and about 50 Kb, for example between about 15 Kb to 30 Kb, between about 20 Kb and about 50 Kb, between about 20 Kb and about 40 Kb, about 5 Kb and about 25 Kb, or about 30 Kb and about 50 Kb.

[0231] In some embodiments, the recombinant nucleic acid includes a nucleic acid sequence encoding a CAR that includes an extracellular ligand-binding domain having a binding affinity for a ligand]; a transmembrane domain; and an intracellular signaling domain. In some embodiments, the CAR encoded by the nucleic acid sequence further includes an optional hinge domain and/or costimulatory domain.

[0232] In some embodiments, a composition has at least two recombinant nucleic acids, each including a nucleic acid sequence encoding a CAR polypeptide described herein to form an “AND” gate CAR combination. In some embodiments, these at least two recombinant nucleic acids are conjugated together. In some embodiments, these at least two recombinant nucleic acids are in a single chain of a recombinant nucleic acid.

[0233] In some embodiments, the recombinant nucleic acid includes a nucleic acid sequence having at least 50% sequence identity to a nucleic acid sequence selected from the group consisting of SEQ ID NOs: 76-98, 133-145, 157-160, 206, 208, 210, 212, 214-220, 222, 224-228, 230, 231, 233, 234, 236, 238, 240, and 242-248. In some embodiments, the recombinant nucleic acid includes a nucleic acid sequence having at least 50%, at least 60%, at least 70%, at least 80%, at least 85%, at least 90%, at least 95%, at least 96%, at least 97%, at least 98%, at least 99%, or 100% sequence identity sequence identity to a nucleic acid sequence selected from the group consisting of SEQ ID NOs: 76-98, 133-145, 157-160, 206, 208, 210, 212, 214-220, 222, 224-228, 230, 231, 233, 234, 236, 238, 240, and 242-248.

[0234] In some embodiments, the recombinant nucleic acid molecule is operably linked to a heterologous nucleic acid sequence.

[0235] In some embodiments, the recombinant nucleic acid molecule is further defined as an expression cassette or a vector. It can be understood that an expression cassette generally includes a construct of genetic material that contains coding sequences and enough regulatory information to direct proper transcription and/or translation of the coding sequences in a recipient cell, in vivo and/or ex vivo. Generally, the expression cassette may be inserted into a vector for targeting to a desired host cell and/or into an individual. As such, in some embodiments, an expression cassette of the disclosure include a coding sequence for the CAR polypeptide as disclosed herein, which is operably linked to expression control elements, such as a promoter, and optionally, any other sequences or a combination of other nucleic acid sequences that affect the transcription or translation of the coding sequence.

[0236] In some embodiments, the nucleotide sequence is incorporated into an expression vector. It can be understood by one skilled in the art that the term “vector” generally refers to a recombinant polynucleotide construct designed for transfer between host cells, and that may be used for the purpose of transformation, e.g., the introduction of heterologous DNA into a host cell. As such, in some embodiments, the vector can be a replicon, such as a plasmid, phage, or cosmid, into which another DNA segment may be inserted so as to bring about the replication of the inserted segment. In some embodiments, the expression vector can be an integrating vector.

[0237] In some embodiments, the expression vector can be a viral vector. As can be appreciated by one of skill in the art, the term “viral vector” is widely used to refer either to a nucleic acid molecule (e.g., a transfer plasmid) that includes virus-derived nucleic acid elements that generally facilitate transfer of the nucleic acid molecule or integration into the genome of a cell or to a viral particle that mediates nucleic acid transfer. Viral particles generally include various viral components and sometimes also host cell components in addition to nucleic acid(s). The term viral vector may refer either to a virus or viral particle capable of transferring a nucleic acid into a cell or to the transferred nucleic acid itself. Viral vectors and transfer plasmids contain structural and/or functional genetic elements that are primarily derived from a virus. In some embodiments, the vector is a vector derived from a lentivirus, an adeno virus, an adeno-associated virus, a baculovirus, or a retrovirus. The term “retroviral vector” refers to a viral vector or plasmid containing structural and functional genetic elements, or portions thereof, that are primarily derived from a retrovirus. The term “lentiviral vector” refers to a viral vector or plasmid containing structural and functional genetic elements, or portions thereof, including LTRs that are primarily derived from a lentivirus, which is a genus of retrovirus.

[0238] In some embodiments, provided herein are nucleic acid molecules encoding a polypeptide with an amino acid sequence having at least about 50%, 60%, 70%, 80%, 90%, 95%, 96%, 97, 98%, 99%, or 100% sequence identity to a CAR polypeptide disclosed herein. In some embodiments, provided herein are nucleic acid molecules encoding a polypeptide with an amino acid sequence having at least about 50% sequence identity to any one of SEQ ID NOs: 27-49, 111-123, 148-151, 162, 164, 166, 168, 170-176, 178, 180-184, 186, 187, 189, 190, 192, 194, 196, and 198-204. In some embodiments, the nucleic acid molecules encode a polypeptide with an amino acid sequence having at least about at least 50%, at least 60%, at least 70%, at least 80%, at least 85%, 90%, 95%, 96%, 97, 98%, 99%, or 100% sequence identity to SEQ ID NOs: 27-49, 111-123, 148-151, 162, 164, 166, 168, 170-176, 178, 180-184, 186, 187, 189, 190, 192, 194, 196, and 198-204.

[0239] The nucleic acid sequences encoding the CAR polypeptides can be optimized for expression in the host cell of interest. For example, the G-C content of the sequence can be adjusted to average levels for a given cellular host, as calculated by reference to known genes expressed in the host cell. Methods for codon usage optimization are known in the art. Codon usages within the coding sequence of the chimeric receptor disclosed herein can be optimized to enhance expression in the host cell, such that about 1%, about 5%, about 10%, about 25%, about 50%, about 75%, or up to 100% of the codons within the coding sequence have been optimized for expression in a particular host cell.

[0240] The nucleic acid molecules provided can contain naturally occurring sequences, or sequences that differ from those that occur naturally, but, due to the degeneracy of the genetic code, encode the same polypeptide, e.g., antibody for the ECD. These nucleic acid molecules can consist of RNA or DNA (for example, genomic DNA, cDNA, or synthetic DNA, such as that produced by phosphoramidite-based synthesis), or combinations or modifications of the nucleotides within these types of nucleic acids. In addition, the nucleic acid molecules can be double-stranded or single-stranded (e.g., either a sense or an antisense strand).

[0241] The nucleic acid molecules are not limited to sequences that encode polypeptides (e.g., antibodies for the ECD); some or all of the non-coding sequences that lie upstream or downstream from a coding sequence (e.g., the coding sequence of a chimeric receptor) can also be included. Those of ordinary skill in the art of molecular biology are familiar with routine procedures for isolating nucleic acid molecules. They can, for example, be generated by treatment of genomic DNA with restriction endonucleases, or by performance of the polymerase chain reaction (PCR). In the event the nucleic acid molecule is a ribonucleic acid (RNA), molecules can be produced, for example, by in vitro transcription.

### Recombinant Cells and Cell Cultures

[0242] The nucleic acid molecules of the present disclosure can be introduced into a cell (i.e., a host cell), such as a human T cell or cancer cell, to produce a recombinant cell containing the nucleic acid molecule. Accordingly, some embodiments of the disclosure relate to methods for making a recombinant cell, including (a) providing a host cell capable of protein expression; and transducing the provided host cell with a recombinant nucleic acid of the disclosure to produce a recombinant cell. Introduction of the nucleic acid molecules of the disclosure into cells can be achieved by methods known to those skilled in the art such as, for example, viral infection, transfection, conjugation, protoplast fusion, lipofection, electroporation, nucleofection, calcium phosphate precipitation, polyethyleneimine (PEI)-mediated transfection, DEAE-dextran mediated transfection, liposome-mediated transfection, particle gun technology, calcium phosphate precipitation, direct micro-injection, nanoparticle-mediated nucleic acid delivery, and the like.

[0243] Accordingly, in some embodiments, the nucleic acid molecules can be introduced into a host cell by viral or non-viral delivery vehicles known in the art to produce an engineered cell. For example, the nucleic acid molecule can be stably integrated in the host genome, or can be episomally replicating, or present in the recombinant host cell as a mini-circle expression vector for a stable or transient expression. Accordingly, in some embodiments disclosed herein, the nucleic acid molecule is maintained and replicated in the recombinant host cell as an episomal unit. In some embodiments, the nucleic acid molecule is stably integrated into the genome of the recombinant cell. Stable integration can be completed using classical random genomic recombination techniques or with more precise genome editing techniques such as using zinc-finger proteins (ZNF), guide RNA directed CRISPR/Cas9, DNA-guided endonuclease genome editing NgAgo (Natronobacterium gregoryi Argonaute), or TALEN genome editing (transcription activator-like effector nucleases).

[0244] The nucleic acid molecules can be encapsulated in a viral capsid or a lipid nanoparticle, or can be delivered by viral or non-viral delivery means and methods known in the art, such as electroporation. For example, introduction of nucleic acids into cells may be achieved by viral transduction. In a non-limiting example, baculoviral virus or adeno-associated virus (AAV) can be engineered to deliver nucleic acids to target cells via viral transduction. Several AAV serotypes have been described, and all of the known serotypes can infect cells from multiple diverse tissue types. AAV is capable of transducing a wide range of species and tissues in vivo with no evidence of toxicity, and it generates relatively mild innate and adaptive immune responses.

[0245] Lentiviral-derived vector systems are also useful for nucleic acid delivery and gene therapy via viral transduction. Lentiviral vectors offer several attractive properties as gene-delivery vehicles, including: (i) sustained gene delivery through stable vector integration into host genome; (ii) the capability of infecting both dividing and non-dividing cells; (iii) broad tissue tropisms, including important gene- and cell-therapy-target cell types; (iv) no expression of viral proteins after vector transduction; (v) the ability to deliver complex genetic elements, such as polycistronic or intron-containing sequences; (vi) a potentially safer integration site profile; and (vii) a relatively easy system for vector manipulation and production.

[0246] In some embodiments, host cells can be genetically engineered (e.g., transduced or transformed or transfected) with, for example, a vector construct of the present application that can be, for example, a viral vector or a vector for homologous recombination that includes nucleic acid sequences homologous to a portion of the genome of the host cell, or can be an expression vector for the expression of the CAR polypeptides of interest.

[0247] In some embodiments, the recombinant cell is a eukaryotic cell. In some embodiments, the cell is in vivo. In some embodiments, the cell is ex vivo. In some embodiments, the cell is in vitro. In some embodiments, the recombinant cell is an animal cell. In some embodiments, the animal cell is a mammalian cell. In some embodiments, the animal cell is a mouse cell. In some embodiments, the animal cell is a human cell. In some embodiments, the cell is a non-human primate cell. In some embodiments, the recombinant cell is an immune system cell, e.g., a B cell, a monocyte, a NK cell, a natural killer T (NKT) cell, a regulatory T cell (Treg), a basophil, an eosinophil, a neutrophil, a dendritic cell, a macrophage, a regulatory T cell, a helper T cell (T_{H}), a cytotoxic T cell (T_{CTL}), a memory T cell, a gamma delta (γδ) T cell, another T cell, a stem cell (e.g., a hematopoietic stem cell), a stem cell progenitor (e.g., a hematopoietic stem cell progenitor) an induced pluripotent stem cell (iPSC)-derived NK cell, or an induced pluripotent stem cell (iPSC)-derived T cell.

[0248] In some embodiments, the immune system cell is a lymphocyte. In some embodiments, the lymphocyte is a T lymphocyte. In some embodiments, the lymphocyte is a T lymphocyte progenitor. In some embodiments, the T lymphocyte is a CD4+ T cell or a CD8+ T cell. In some embodiments, the T lymphocyte is a CD8+ T cytotoxic lymphocyte cell. Non-limiting examples of CD8+ T cytotoxic lymphocyte cell suitable for the compositions and methods disclosed herein include naïve CD8+ T cells, central memory CD8+ T cells, effector memory CD8+ T cells, effector CD8+ T cells, CD8+ stem memory T cells, and bulk CD8+ T cells. In some embodiments, the T lymphocyte is a CD4+T helper lymphocyte cell. Suitable CD4+ T helper lymphocyte cells include, but are not limited to, naïve CD4+ T cells, central memory CD4+ T cells, effector memory CD4+ T cells, effector CD4+ T cells, CD4+ stem memory T cells, and bulk CD4+ T cells.

[0249] In some embodiments, the host cell described herein is a non-immune system cell. For example, the CAR molecules and/or the CAR molecule combinations described herein provide a method to modulate the activity of (e.g., to activate) a cell expressing such CAR molecules and/or combinations, upon recognizing the corresponding extracellular ligand(s)/antigen(s). In this sense, there are no particular limitations with regard to suitable host cell.

[0250] As outlined above, some embodiments of the disclosure relate to various methods for making a recombinant cell, including (a) providing a host cell capable of protein expression; and transducing the provided host cell with a recombinant nucleic acid of the disclosure to produce a recombinant cell. Non-limiting exemplary embodiments of the disclosed methods for making a recombinant cell can further include one or more of the following features. In some embodiments, the host cell is obtained by leukapheresis performed on a sample obtained from a subject, and the cell is transduced ex vivo. In some embodiments, the recombinant nucleic acid is encapsulated in a viral capsid or a lipid nanoparticle. In some embodiments, the methods further include isolating and/or purifying the produced cells. Accordingly, the recombinant cells produced by the methods disclosed herein are also within the scope of the disclosure.

[0251] Techniques for transforming a wide variety of the above-mentioned host cells and species are known in the art and described in the technical and scientific literature. For example, DNA vectors can be introduced into eukaryotic cells via conventional transformation or transfection techniques. Suitable methods for transforming or transfecting cells can be found in Sambrook et al. (2012, supra) and other standard molecular biology laboratory manuals, such as, calcium phosphate transfection, DEAE-dextran mediated transfection, transfection, microinjection, cationic lipid-mediated transfection, electroporation, transduction, scrape loading, ballistic introduction, nucleoporation, hydrodynamic shock, and infection. In some embodiments, the nucleic acid molecule is introduced into a host cell by a transduction procedure, electroporation procedure, or a biolistic procedure. Accordingly, cell cultures including at least one recombinant cell as disclosed herein are also within the scope of this application. Methods and systems suitable for generating and maintaining cell cultures are known in the art.

[0252] In some embodiments, the recombinant cell includes a nucleic acid molecule including a nucleic acid sequence encoding a CAR having at least 50%, 60%, 70%, 80%, 90%, 95%, 96%, 97, 98%, 99%, or 100% sequence identity to a CAR polypeptide disclosed herein. In some embodiments, the recombinant cell includes a nucleic acid molecule encoding a polypeptide with an amino acid sequence having at least about 50%, 60%, 70%, 80%, 90%, 95%, 96%, 97, 98%, 99%, or 100% sequence identity to any one of SEQ ID NOs: 27-49, 111-123, 148-151, 162, 164, 166, 168, 170-176, 178, 180-184, 186, 187, 189, 190, 192, 194, 196, and 198-204.

[0253] In a related aspect, some embodiments of the disclosure relate to cell cultures including at least one recombinant cell as disclosed herein, and a culture medium. Generally, the culture medium can be any one of suitable culture media for the cell cultures described herein. In some embodiments, the recombinant cell expresses a CAR described herein. Accordingly, cell cultures including at least one recombinant cell as disclosed herein are also within the scope of this application. Methods and systems suitable for generating and maintaining cell cultures are known in the art.

### Pharmaceutical Compositions

[0254] The CAR polypeptides, nucleic acids, recombinant cells, and/or cell cultures of the disclosure can be incorporated into compositions, including pharmaceutical compositions. Such compositions generally include the CARs, nucleic acids, recombinant cells, and/or cell cultures as described herein and a pharmaceutically acceptable carrier. Accordingly, in one aspect, some embodiments of the disclosure relate to pharmaceutical compositions for treating, preventing, ameliorating, reducing or delaying the onset of a health condition, for example a proliferative disease (e.g., cancer). Other exemplary health conditions include, e.g., hematological malignancies, solid tumors, autoimmune diseases, inflammations, allergic diseases, infections, senescence/aging, etc.

[0255] Accordingly, one aspect of the present disclosure relates to pharmaceutical compositions that include a pharmaceutically acceptable carrier and one or more of the following: (a) a CAR polypeptide of the disclosure; (b) a nucleic acid molecule of the disclosure; and/or (c) a recombinant cell of the disclosure. In some embodiments, the composition includes (a) a recombinant nucleic acid of the disclosure and (b) a pharmaceutically acceptable carrier. In some embodiments, the recombinant nucleic acid is encapsulated in a viral capsid or a lipid nanoparticle. In some embodiments, the composition includes (a) a recombinant cell of the disclosure and (b) a pharmaceutically acceptable carrier.

[0256] In certain embodiments, the pharmaceutical compositions in accordance with some embodiments disclosed herein include cell cultures that can be washed, treated, combined, supplemented, or otherwise altered prior to administration to an individual in need thereof. Furthermore, administration can be at varied doses, time intervals or in multiple administrations.

[0257] The pharmaceutical compositions provided herein can be in any form that allows for the composition to be administered to an individual. In some specific embodiments, the pharmaceutical compositions are suitable for human administration. As used herein, the term “pharmaceutically acceptable” means approved by a regulatory agency of the Federal or a state government or listed in the U.S. Pharmacopeia or other generally recognized pharmacopeia for use in animals, and more particularly in humans. The carrier can be a diluent, adjuvant, excipient, or vehicle with which the pharmaceutical composition is administered. Saline solutions and aqueous dextrose and glycerol solutions can also be employed as liquid carriers, including injectable solutions. Suitable excipients include starch, glucose, lactose, sucrose, gelatin, malt, rice, flour, chalk, silica gel, sodium stearate, glycerol monostearate, talc, sodium chloride, dried skim milk, glycerol, propylene, glycol, water, ethanol and the like. Examples of suitable pharmaceutical carriers are described in “Remington's Pharmaceutical Sciences” by E. W. Martin. In some embodiments, the pharmaceutical composition is sterilely formulated for administration into an individual. In some embodiments, the individual is a human. One of ordinary skilled in the art can appreciate that the formulation should suit the mode of administration.

[0258] In some embodiments, the pharmaceutical compositions of the present disclosure are formulated to be suitable for the intended route of administration to an individual. For example, the pharmaceutical composition may be formulated to be suitable for parenteral, intraperitoneal, colorectal, intraperitoneal, and intratumoral administration. In some embodiments, the pharmaceutical composition may be formulated for intravenous, oral, intraperitoneal, intratracheal, subcutaneous, intramuscular, topical, or intratumoral administration.

### Use of the Compositions

[0259] The compositions described herein, e.g., CARs (alone or in combinations), nucleic acids, recombinant cells, cell cultures, and/or pharmaceutical compositions, can be used for various conditions, as a system in response to extracellular signals (e.g., ligands/antigens).

[0260] For example, the compositions described herein may be used as a detection system for detecting certain ligands/antigens. As described herein, in principle, there are no particular limitations with regard to suitable target antigens and suitable host cells. In some embodiments, targeting a specific ligand/antigen or a specific profile of ligands/antigens, the corresponding CAR molecule(s) is prepared to having an extracellular antigen-binding domain (ECD) to specifically binding to the ligand(s)/antigen(s). The corresponding intracellular signaling domain(s) can then activate, after the ligand/antigen binding, the host cell to produce a signal to be detected, such as expressing a gene for detection (e.g., by detecting the expressed DNA/RNA/protein or any luminescence/fluorescence from the expressed protein). In some embodiments, such detection system may be used for detecting certain biomarkers in a biological sample, such as used for diagnosis of any disease or disorder.

[0261] The compositions described herein may also be used as an activation system to manipulate cell functions in response to certain ligands/antigens. In some embodiments, by sensing a specific ligand/antigen or a specific profile of ligands/antigens with the ECD(s) of the CAR molecules or CAR molecule combinations, the host is activated. Such activation may enhance or inhibit the normal biological functions of the host cell, and/or provide an exogenous signaling function to manipulate the cell functions.

[0262] The compositions described herein may also be used to manipulate the functions of a target cell in response to certain ligands/antigens. In some embodiments, by sensing a specific ligand/antigen or a specific profile of ligands/antigens with the ECD(s) of the CAR molecules or CAR molecule combinations, the host cell is activated. Such activation may enhance or inhibit the functions of the host cell to change the function of a target cell, which expresses such ligand(s)/antigen(s) or is specifically recognized by certain ligand(s)/antigen(s). For example, a cancer cell expressing certain ligand(s)/antigen(s) may be recognized by the CAR molecule(s) or CAR molecule combination(s) described herein, either through the ECD binding to the ligand(s)/antigen(s) on the surface of the cancer cell or binding to some ligand(s)/antigen(s) which specifically binds to the ligand(s)/antigen(s) expressed on the cancer cell. The activated host cell can then manipulate the function of the cancer cell. For example, the compositions described herein may be used to activate the host cell (e.g., an immune system cell, such as a T cell) to antagonize or kill the cancer cells (e.g., by secreting cytokines or direct killing). Methods are provided herein for a CAR molecule or CAR molecule combination to detect the recognized target cells (e.g., cancer cells) and/or to activate the cytotoxicity of the host cell, such as to antagonize and/or kill the recognized target cells (e.g., cancer cells). In some embodiments, such target cells (e.g., cancer cells) are obtained from a biological sample form a subject. In some embodiments, such target cells (e.g., cancer cells) are in a biological environment (e.g., a cancer microenvironment) of a subject. In some embodiments, the target cell is correlated to a disease or disorder. Exemplary diseases or disorders may include, e.g., proliferative diseases (e.g., cancers), hematological malignancies, solid tumors, autoimmune diseases, inflammations, allergic diseases, infections, senescence/aging, etc.

### Methods of Treatment

[0263] Administration of any one of the therapeutic compositions described herein, e.g., CARs, nucleic acids, recombinant cells, cell cultures, and/or pharmaceutical compositions, can be used in the diagnosis, prevention, and/or treatment of relevant conditions, such as proliferative diseases (e.g., cancer), hematological malignancies, solid tumors, autoimmune diseases, inflammations, allergic diseases, infections, senescence/aging, etc. In some embodiments, the CARs, nucleic acids, recombinant cells, cell cultures, and/or pharmaceutical compositions as described herein can be incorporated into therapies and therapeutic agents for use in methods of preventing and/or treating an individual who has, who is suspected of having, or who may be at high risk for developing one or more health conditions, such as proliferative diseases (e.g., cancers, such as a leukemia, a neuroblastoma, or an osteosarcoma). In some embodiments, the individual is a patient under the care of a physician.

[0264] Exemplary proliferative diseases can include, without limitation, angiogenic diseases, a metastatic diseases, tumorigenic diseases, neoplastic diseases and cancers. In some embodiments, the proliferative disease is a cancer. In some embodiments, the cancer is a pediatric cancer. In some embodiments, the cancer is pancreatic cancer, colon cancer, ovarian cancer, prostate cancer, lung cancer, mesothelioma, breast cancer, urothelial cancer, liver cancer, head and neck cancer, sarcoma, cervical cancer, stomach cancer, gastric cancer, melanoma, uveal melanoma, cholangiocarcinoma, multiple myeloma, leukemia, lymphoma, haematological cancer, bladder cancer, neuroblastoma, malignant pleural mesothelioma, sarcoma, and glioblastoma. Exemplary cancer types also include: Acute myeloid leukemia, Angioimmunoblastic T-cell lymphoma, B-cell acute lymphoblastic leukemia, Sweet Syndrome, T-cell Non-Hodgkins lymphoma (including natural killer/T-cell lymphoma, adult T-cell leukaemia/lymphoma, enteropathy type T-cell lymphoma, hepatosplenic T-cell lymphoma and cutaneous T-cell lymphoma), T-cell acute lymphoblastic leukemia, B-cell Non-Hodgkins lymphoma (including Burkitt lymphoma, diffuse large B-cell lymphoma, Follicular lymphoma, Mantle cell lymphoma, Marginal Zone lymphoma, etc.), Hairy Cell Leukemia, Hodgkin lymphoma, Lymphoblastic lymphoma, Lymphoplasmacytic lymphoma, Mucosa-associated lymphoid tissue lymphoma, Multiple myeloma, Myelodysplastic syndrome, Plasma cell myeloma, Primary mediastinal large B-cell lymphoma, chronic myeloproliferative disorders (such as chronic myeloid leukemia, primary myelofibrosis, essential thrombocytemia, polycytemia vera) and chronic lymphocytic leukemia. Exemplary cancer types also include: acute lymphoblastic leukemia (ALL), acute myeloid leukemia (AML), adrenocortical carcinoma, AIDS-related cancers, Kaposi sarcoma (soft tissue sarcoma), AIDS-related lymphoma, primary CNS lymphoma, anal cancer, appendix cancer, astrocytomas, childhood brain cancer, atypical teratoid/rhabdoid tumor, central nervous system cancer, skin cancer (e.g., basal cell carcinoma), bile duct cancer, bladder cancer, bone cancer (includes Ewing sarcoma, osteosarcoma and malignant fibrous histiocytoma), brain tumors, breast cancer, bronchial tumors, Burkitt lymphoma, non-Hodgkin lymphoma, carcinoid tumor, Cardiac (heat) tumors, medulloblastoma and other CNS embryonal tumors, germ cell tumor, Primary CNS Lymphoma, Cervical Cancer, Childhood Cancers, Cholangiocarcinoma, Chordoma, Chronic Lymphocytic Leukemia (CLL), Chronic Myelogenous Leukemia (CML), Chronic Myeloproliferative Neoplasms, Colorectal Cancer, Craniopharyngioma, Cutaneous T-Cell Lymphoma, Mycosis Fungoides, Sézary Syndrome, ductal carcinoma in situ (DCIS), Embryonal Tumors, Medulloblastoma, Endometrial Cancer (Uterine Cancer), Ependymoma, Esophageal Cancer, Esthesioneuroblastoma (Head and Neck Cancer), Ewing Sarcoma, Extracranial Germ Cell Tumor, Childhood Extragonadal Germ Cell Tumor, Eye Cancer, Intraocular Melanoma, Retinoblastoma, Fallopian Tube Cancer, Osteosarcoma, Gallbladder Cancer, Gastric (Stomach) Cancer, Gastrointestinal Carcinoid Tumor, Gastrointestinal Stromal Tumors (GIST) (Soft Tissue Sarcoma), Germ Cell Tumors, Extragonadal Germ Cell Tumors, Ovarian Germ Cell Tumors, Testicular Cancer, Gestational Trophoblastic Disease, Hairy Cell Leukemia, Head and Neck Cancer, Heart Tumors, Childhood Hepatocellular (Liver) Cancer, Histiocytosis, Hodgkin Lymphoma, Hypopharyngeal Cancer (Head and Neck Cancer), Intraocular Melanoma, Islet Cell Tumors, Pancreatic Neuroendocrine Tumors, Kidney (Renal Cell) Cancer, Langerhans Cell Histiocytosis, Laryngeal Cancer, Leukemia, Lip and Oral Cavity Cancer, Liver Cancer, Lung Cancer (e.g., Non-Small Cell, Small Cell, Pleuropulmonary Blastoma, and Tracheobronchial Tumor), Lymphoma, Male Breast Cancer, Malignant Fibrous Histiocytoma of Bone and Osteosarcoma, Melanoma, Intraocular Melanoma, Merkel Cell Carcinoma, Mesothelioma, Metastatic Cancer, Metastatic Squamous Neck Cancer with Occult Primary, Midline Tract Carcinoma, Mouth Cancer, Multiple Endocrine Neoplasia Syndromes, Multiple Myeloma/Plasma Cell Neoplasms, Mycosis Fungoides (Lymphoma), Myelodysplastic Syndromes, Myelodysplastic/Myeloproliferative Neoplasms, Myelogenous Leukemia, Chronic Myeloproliferative Neoplasms, Nasal Cavity and Paranasal Sinus Cancer, Nasopharyngeal Cancer, Neuroblastoma, Non-Hodgkin Lymphoma, Non-Small Cell Lung Cancer, Oral Cancer, Lip and Oral Cavity Cancer and Oropharyngeal Cancer, Osteosarcoma, Undifferentiated Pleomorphic Sarcoma, Ovarian Cancer, Pancreatic Cancer, Pancreatic Neuroendocrine Tumors (Islet Cell Tumors), Papillomatosis (Childhood Laryngeal), Paraganglioma, Paranasal Sinus and Nasal Cavity Cancer, Parathyroid Cancer, Penile Cancer, Pharyngeal Cancer, Pheochromocytoma, Pituitary Tumor, Plasma Cell Neoplasm/Multiple Myeloma, Pleuropulmonary Blastoma (Lung Cancer), Pregnancy and Breast Cancer, Primary Central Nervous System (CNS) Lymphoma, Primary Peritoneal Cancer Prostate Cancer, Rectal Cancer, Recurrent Cancer, Retinoblastoma, Rhabdomyosarcoma, Salivary Gland Cancer, Sarcoma, Childhood Rhabdomyosarcoma, Childhood Vascular Tumors, Soft Tissue Sarcoma, Uterine Sarcoma, Sézary Syndrome, Skin Cancer, Small Cell Lung Cancer Small Intestine Cancer, Soft Tissue Sarcoma, Squamous Cell Carcinoma, Squamous Neck Cancer with Occult Primary, Stomach (Gastric) Cancer, T-Cell Lymphoma, Testicular Cancer, Throat Cancer, Nasopharyngeal Cancer, Oropharyngeal Cancer, Hypopharyngeal Cancer, Thymoma and Thymic Carcinoma, Thyroid Cancer, Tracheobronchial Tumors, Transitional Cell Cancer of the Renal Pelvis and Ureter, Carcinoma of Ureter and Renal Pelvis, Transitional Cell Cancer, Urethral Cancer, Uterine Cancer, Uterine Sarcoma, Vaginal Cancer, Vascular Tumors, Vulvar Cancer, Wilms Tumor, and other Childhood Kidney Tumors.

[0265] In some embodiments, the cancer is a multiply drug resistant cancer or a recurrent cancer. It is contemplated that the compositions and methods disclosed here are suitable for both non-metastatic cancers and metastatic cancers. Accordingly, in some embodiments, the cancer is a non-metastatic cancer. In some other embodiments, the cancer is a metastatic cancer. In some embodiments, the composition administered to the subject inhibits metastasis of the cancer in the subject. In some embodiments, the administered composition inhibits tumor growth in the subject.

[0266] Accordingly, in one aspect, some embodiments of the disclosure relate to methods for the prevention and/or treatment of a condition in a subject in need thereof, wherein the methods include administering to the subject a composition including one or more of: a CAR polypeptide of the disclosure, a recombinant nucleic acid of the disclosure, a recombinant cell of the disclosure, and/or a pharmaceutical composition of the disclosure.

[0267] In some embodiments, the administered composition inhibits proliferation of a target cancer cell, and/or inhibits tumor growth of the cancer in the subject. For example, the target cell may be inhibited if its proliferation is reduced, if its pathologic or pathogenic behavior is reduced, if it is destroyed or killed, etc. Inhibition includes a reduction of the measured pathologic or pathogenic behavior of at least about 10%, about 15%, about 20%, about 25%, about 30%, about 35%, about 40%, about 45%, about 50%, about 55%, about 60%, about 65%, about 70%, about 75%, about 80%, about 85%, about 90%, or about 95%. In some embodiments, the methods include administering to the individual an effective number of the recombinant cells disclosed herein, wherein the recombinant cells inhibit the proliferation of the target cancer cell and/or inhibit tumor growth of a target cancer in the subject compared to the proliferation of the target cell and/or tumor growth of the target cancer in subjects who have not been administered with the recombinant cells. In some embodiments, the target cancer cell is a leukemia cancer cell, a cell derived from a leukemia cancer cell, or a cell in a microenvironment of a leukemia. In some embodiments, the target cancer cell is a neuroblastoma cell, a cell derived from a neuroblastoma cell, or a cell in a microenvironment of a neuroblastoma. In some embodiments, the target cancer cell is an osteosarcoma cell, a cell derived from an osteosarcoma cell, or a cell in a microenvironment of an osteosarcoma. In some embodiments, the target cancer cell is an autoimmune cell.

[0268] The terms “administration” and “administering”, as used herein, refer to the delivery of a bioactive composition or formulation by an administration route including, but not limited to, oral, intravenous, intra-arterial, intramuscular, intraperitoneal, subcutaneous, intramuscular, and topical administration, or combinations thereof. The term includes, but is not limited to, administering by a medical professional and self-administering.

[0269] Administration of the compositions described herein, e.g., CARs, nucleic acids, recombinant cells, cell cultures, and/or pharmaceutical compositions, can be used in the stimulation of an immune response. In some embodiments, CARs, nucleic acids, recombinant cells, cell cultures, and/or pharmaceutical compositions as described herein are administered to an individual after induction of remission of cancer with chemotherapy, or after autologous or allogeneic hematopoietic stem cell transplantation. In some embodiments, compositions described herein are administered to an individual in need of increasing the production of interferon gamma (IFNγ), TNF-α, and/or interleukin-2 (IL-2) in the treated subject relative to the production of these molecules in subjects who have not been administered one of the therapeutic compositions disclosed herein.

[0270] An effective amount of the compositions described herein, e.g., CARs, nucleic acids, recombinant cells, cell cultures, and/or pharmaceutical compositions, is determined based on the intended goal, for example tumor regression. For example, where existing cancer is being treated, the amount of a composition disclosed herein to be administered may be greater than where administration of the composition is for prevention of cancer. One of ordinary skill in the art would be able to determine the amount of a composition to be administered and the frequency of administration in view of this disclosure. The quantity to be administered, both according to number of treatments and dose, also depends on the individual to be treated, the state of the individual, and the protection desired. Precise amounts of the composition also depend on the judgment of the practitioner and are peculiar to each individual. Frequency of administration could range from 1-2 days, to 2-6 hours, to 6-10 hours, to 1-2 weeks or longer depending on the judgment of the practitioner.

[0271] In some embodiments, administration is by bolus injection. In some embodiments, administration is by intravenous infusion. In some embodiments, a composition is administered is administered in a dosage of about 100 ng/kg of body weight per day to about 100 mg/kg of body weight per day. In some embodiments, a composition as disclosed herein is administered in a dosage of about 0.001 mg/kg to 100 mg/kg of body weight per day. In some embodiments, the therapeutic agents are administered in a single administration. In some embodiments, therapeutic agents are administered in multiple administrations, (e.g., once or more per week for one or more weeks).

[0272] One of ordinary skill in the art would be familiar with techniques for administering compositions of the disclosure to an individual. Furthermore, one of ordinary skill in the art would be familiar with techniques and pharmaceutical reagents necessary for preparation of these compositions prior to administration to an individual.

[0273] In certain embodiments of the present disclosure, the composition of the disclosure contains an aqueous composition that includes one or more of the CARs, nucleic acids, recombinant cells, cell cultures, and/or pharmaceutical compositions as described herein. Aqueous compositions of the present disclosure contain an effective amount of a composition disclosed herein in a pharmaceutically acceptable carrier or aqueous medium. Thus, the “pharmaceutical preparation” or “pharmaceutical composition” of the disclosure can include any and all solvents, dispersion media, coatings, antibacterial and antifungal agents, isotonic and absorption delaying agents and the like. The use of such media and agents for pharmaceutical active substances is well known in the art. Except insofar as any conventional media or agent is incompatible with the recombinant cells disclosed herein, its use in the manufacture of the pharmaceutical compositions is contemplated. Supplementary active ingredients can also be incorporated into the compositions. For human administration, preparations should meet sterility, pyrogenicity, general safety, and purity standards as required by the FDA Center for Biologics.

[0274] One of ordinary skill in the art would appreciate that biological materials should be extensively dialyzed to remove undesired small molecular weight molecules and/or lyophilized for more ready formulation into a desired vehicle, where appropriate. The compositions described herein, e.g., CARs, nucleic acids, recombinant cells, cell cultures, and/or pharmaceutical compositions, can then generally be formulated for administration by any known route, such as parenteral administration. Determination of the amount of compositions to be administered can be made by one of skill in the art, and can in part be dependent on the extent and severity of cancer, and whether the recombinant cells are being administered for treatment of existing cancer or prevention of cancer. The preparation of the compositions containing the CARs, nucleic acids, recombinant cells, cell cultures, and/or pharmaceutical compositions of the disclosure can be known to those of skill in the art in light of the present disclosure.

[0275] Upon formulation, the compositions of the disclosure can be administered in a manner compatible with the dosage formulation and in such amount as is therapeutically effective. The compositions can be administered in a variety of dosage forms, such as the type of injectable solutions described above.

[0276] In some embodiments, CARs, nucleic acids, recombinant cells, cell cultures, and/or pharmaceutical compositions described herein can be used to reduce T cell exhaustion in the corresponding T cells or in the treated subject relative to a subject who has not been administered one of the therapeutic compositions disclosed herein. In some embodiments, CARs, nucleic acids, recombinant cells, cell cultures, and/or pharmaceutical compositions described herein can be used to stimulate proliferation and/or killing capacity of CAR T-cells in the treated subject relative to the production of these molecules in subjects who have not been administered one of the therapeutic compositions disclosed herein. The production of interferon gamma (IFNγ), TNF-α, and/or interleukin-2 (IL-2) can be stimulated to produce up to about 20 fold, such as any of about 2 fold, 3 fold, 4 fold, 5 fold, 6 fold, 7 fold, 8 fold, 9 fold, 10 fold, 11 fold, 12 fold, 13 fold, 14 fold, 15 fold 16 fold, 17 fold, 18 fold, 19 fold, or 20 fold or higher compared to the production of interferon gamma (IFNγ), TNF-α, and/or interleukin-2 (IL-2) in subjects who have not been administered one of the therapeutic compositions disclosed herein.

### Administration of Recombinant Cells to a Subject

[0277] In some embodiments, the methods of the disclosure involve administering an effective amount or number of the recombinants cells provided here to a subject in need thereof. This administering step can be accomplished using any method of implantation delivery in the art. For example, the recombinant cells can be infused directly in the subject's bloodstream or otherwise administered to the subject.

[0278] In some embodiments, the methods disclosed herein include administering, which term is used interchangeably with the terms “introducing,” implanting,” and “transplanting,” recombinant cells into an individual, by a method or route that results in at least partial localization of the introduced cells at a desired site such that a desired effect(s) is/are produced. The recombinant cells or their differentiated progeny can be administered by any appropriate route that results in delivery to a desired location in the individual where at least a portion of the administered cells or components of the cells remain viable. The period of viability of the cells after administration to a subject can be as short as a few hours, e.g., twenty-four hours, to a few days, to as long as several years, or even the lifetime of the individual, i.e., long-term engraftment.

[0279] In some embodiments, the delivery of a recombinant cell composition (e.g., a composition including a plurality of recombinant cells according to any of the cells described herein) into a subject by a method or route results in at least partial localization of the cell composition at a desired site. Modes of administration include, e.g., injection, infusion, and instillation. “Injection” includes, without limitation, intravenous, intramuscular, intra-arterial, intrathecal, intraventricular, intracapsular, intraorbital, intracardiac, intradermal, intraperitoneal, transtracheal, subcutaneous, subcuticular, intraarticular, subcapsular, subarachnoid, intraspinal, intracerebrospinal, and intrasternal injection and infusion. In some embodiments, the route is intravenous. For the delivery of cells, delivery by injection or infusion is a standard mode of administration.

[0280] In some embodiments, the recombinant cells are administered systemically, e.g., via infusion or injection.

### Kits

[0281] Also provided herein are various kits for the practice of a method described herein. In particular, some embodiments of the disclosure provide kits for the diagnosis of a condition in a subject. Some other embodiments relate to kits for the prevention of a condition in a subject in need thereof. Some other embodiments relate to kits for methods of treating a condition in a subject in need thereof. For example, provided herein, in some embodiments, are kits that include one or more of the CAR polypeptides, recombinant nucleic acids, engineered cells, or pharmaceutical compositions as provided and described herein, as well as written instructions for making and using the same.

[0282] In some embodiments, the kits of the disclosure further include one or more means useful for the administration of any one of the provided CAR polypeptides, recombinant nucleic acids, engineered cells, or pharmaceutical compositions to an individual. For example, in some embodiments, the kits of the disclosure further include one or more syringes (including pre-filled syringes) and/or catheters (including pre-filled syringes) used to administer any one of the provided CAR polypeptides, recombinant nucleic acids, engineered cells, or pharmaceutical compositions to an individual. In some embodiments, a kit can have one or more additional therapeutic agents that can be administered simultaneously or sequentially with the other kit components for a desired purpose, e.g., for diagnosing, preventing, or treating a condition in a subject in need thereof.

[0283] In some embodiments, a kit can further include instructions for using the components of the kit to practice the methods disclosed herein.

[0284] No admission is made that any reference cited herein constitutes prior art. The discussion of the references states what their authors assert, and the inventors reserve the right to challenge the accuracy and pertinence of the cited documents. It can be clearly understood that, although a number of information sources, including scientific journal articles, patent documents, and textbooks, are referred to herein; this reference does not constitute an admission that any of these documents forms part of the common general knowledge in the art.

[0285] The discussion of the general methods given herein is intended for illustrative purposes only. Other alternative methods and alternatives can be apparent to those of skill in the art upon review of this disclosure, and are to be included within the spirit and purview of this application.

### EXAMPLES

[0286] Additional embodiments are disclosed in further detail in the following examples, which are provided by way of illustration and are not in any way intended to limit the scope of this disclosure or the claims.

### Example 1

### Identifying Downstream T Cell Response Signaling Molecules for Use in CAR Constructs

[0287] This Example describes experiments performed to illustrate the identification of essential downstream T cell response (TCR) signaling molecules. Exemplary CAR molecules were engineered by replacing traditional signaling domains with alternative molecules from the proximal T cell signaling cascade. The engineered CAR molecules were then tested for their functions to activate cells expressing these molecules, such as the function to elicit T cell anti-tumor activity.

[0288] Proximal signaling molecules were tested to see if any of them is sufficient to propagate a T cell signal. Since most proximal signaling molecules are cytosolic and do not have a TM domain, CAR constructs were prepared by linking an scFv (e.g., recognizing CD19 or HER2) and a CD28 hinge/transmembrane (28H/TM) domain directly to each proximal signaling molecule. FIG. 1 shows FACS histograms illustrating each of several downstream TCR signaling molecule constructs. Exemplary constructs contain LCK, FYN, ZAP70, LAT, SLP-76, or PLC-gamma (PLCG1). The truncated ZAP70 construct ZAP70²⁵⁵⁻⁶⁰⁰ was used because the CAR construct having either the full-length ZAP70 or only the kinase domain of ZAP70 did not express on the surface of T cells, while the truncated ZAP70²⁵⁵⁻⁶⁰⁰ version did express (FIG. 3). The truncated ZAP70²⁵⁵⁻⁶⁰⁰ contains the intramolecular linker, interdomain B and a segment of the kinase domain of ZAP70. These differences in expression patterns were found in both HER2-recognizing ZAP70 CAR constructs (FIG. 3) and CD19-recognizing ZAP70 CAR constructs.

[0289] The TCR signaling molecule constructs were tested for their abilities to induce cytokine (e.g., IL-2) generation in response to antigen exposure. Exemplary constructs listed above were expressed in primary T cells and the cytokine production by the T cells in the presence of tumor cell lines expressing CD19 and HER2 antigens were measured and compared. As shown in FIGS. 2 and 4, LAT, SLP-76, LCK, and FYN CARs did not promote T cells to produce IL-2 in response to antigen (CD19). Thus, each of these downstream TCR signaling molecules, as in the CAR construct, is not sufficient for inducing T cell activity. Furthermore, CAR molecules with a truncated ZAP70²⁵⁵⁻⁶⁰⁰ fragment were tested for their abilities to induce the T cell cytotoxic activity to tumor cells expressing the antigen (e.g., CD19 or HER2). As shown in FIGS. 4 and 5A-5C, the ZAP70²⁵⁵⁻⁶⁰⁰ CARs targeting HER2, B7-H3, or GD2, similar to traditional CD28-zeta (CD28) and 4-1BB-zeta (4-1BB CARs, were able to promote T cells to kill tumor cells and to generate cytokines (e.g., IL-2) in response to tumor exposure. A comparison of all these CAR molecules for their capacities of inducing IL-2 expression by T cells is shown in FIG. 4. As shown in FIGS. 4 and 6A-6B, similar PLCG1 (i.e., PLCgamma1 or PLCγ1) CAR constructs also induced the cytotoxic and/or cytokine (IL-2) production activity of T cells in response to tumor exposure. As a summary of these experiments, CAR molecules having endodomains consisting of either the truncated form of ZAP70 (i.e., ZAP70²⁵⁵⁻⁶⁰⁰) or PLCG1 activated T cells, measured by cytokine production and tumor cytotoxicity of the T cells, while others tested CAR constructs (LAT, LCK, FYN, or SLP-76) did not activate T cells to produce IL-2. These findings demonstrate that T cell activity is not dependent on CD3zeta, but can be elicited, in an antigen specific manner, by CARs containing specific proximal signaling molecules as well. These also demonstrate that cytosolic molecules that appear downstream in signaling cascades can be used in CAR constructs and can be sufficient to initiate and drive cell activation.

### Example 2

### Engineering Boolean Logic Gated CAR Constructs

[0290] This Example describes experiments performed to generate a molecular toolbox to develop effective Boolean logic gated CAR T cells (e.g., a CAR T cell expressing two CAR molecules in which the cell is activated only when both CAR molecules bind to their specific ligands and activate their cytosolic signaling domains, a.k.a., an “AND” gate). The generated CAR T cells are capable of discriminating between diseased cells and normal tissues.

[0291] It is important to note that CD3zeta alone within a CAR molecule is sufficient to trigger cytolytic activity in the presence of antigen. Therefore, for solid tumors and myeloid malignancies, where most antigen targets are shared with normal and vital tissues, CARs capable of inducing an anti-tumor response are also capable of mediating serious and life threatening on-target, off-tumor toxicity. Reliance on incorporating CD3zeta within CARs has severely limited the ability to develop complex Boolean gated CARs that conditionally control CAR T cell function. For example, multiple groups have attempted to design an AND-gate CAR which can trigger an anti-tumor response only when two target antigens are both present. All have major limitations that preclude their widespread use in the clinic, largely based on their reliance on CD3zeta. In a first attempt, the CD3zeta and costimulatory domain were separated onto two different CARs with distinct specificities (“Split CAR”,) (Kloss et al. Nat Biotechnol. 2013; 31:71-75). While this led to attenuation of CAR activity when only one antigen was engaged, CARs containing only CD3zeta without a costimulatory domain are still active and capable of mediating on-target, off-tumor toxicity in patients (Lamers et al. Mol Ther. 2013; 21:904-912). A technically more sophisticated system, SynNotch, relied on transcriptional control of a CD3zeta containing CAR in response to antigen encounter (Roybal et al. Cell. 2016; 164:770-779). Upon encountering antigen A, the SynNotch receptor drove expression of a fully enabled CD3zeta containing CAR against antigen B. Studies have demonstrated that this system does not function as a true AND gate because once the CD3zeta containing CAR is expressed, T cells are cable of killing both tumor cells and normal bystander cells that express only the second antigen. In fact, mice treated with a ROR1-specific CAR using this system demonstrated on-target, off-tumor toxicity that resulted in death (Srivastava et al. Cancer Cell. 2019; 35:489-503.e8).

[0292] In this Example, by linking cytosolic molecules from the T cell signaling cascade to a CAR, a molecular toolbox was generated to develop exemplary truly effective Boolean logic gated CAR T cells. An exemplary system described herein, not relying on CD3zeta, is capable of rapidly and reversibly activating T cells only when encountering two antigens simultaneously. By escaping the dominant paradigm that CD3zeta is required for CAR T cell activation, complete control of CAR T cell activity is achieved by a Boolean logic gated system, greatly expanding the CAR reach in the clinic.

[0293] In a detailed illustration of the T cell signaling cascade, CD3zeta is phosphorylated by LCK and/or FYN (FIG. 7A) and then serves as a docking site for ZAP70, resulting in its activation (FIG. 7B). ZAP70 then phosphorylates several downstream adapter and scaffold proteins, the most important of which are LAT and SLP-76. Once phosphorylated, LAT and SLP-76 come together to form a scaffold for PLCG1 and other molecules that are capable of mediating downstream effector functions (FIG. 7C).

[0294] An exemplary AND gate for CAR signaling was designed by expressing separate CARs to bring together LAT and SLP-76, the targets of ZAP70 that form a binding site for PLCG1 (FIG. 8A). Either a LAT CAR or a SLP-76 CAR, prepared as described in Example 1, was not sufficient to activate T cells exposed to target antigens to produce cytokine (IL-2) (FIG. 8B). However, when the two CARs (targeting different antigens) were co-expressed on a single T cell, which was exposed to tumor cells expressing both target antigens, robust T cell activation was achieved (FIGS. 8B and 10).

[0295] CAR molecules were prepared in a construct framework having an extracellular antigen-binding domain specifically recognizing CD19 or HER2 antigens, a CD28 hinge/transmembrane domain, and a cytosolic signaling domain having each of the proximal signaling molecules. FACS data for several combinations of signaling molecules is shown in FIG. 9. Other combinations of signaling molecules in similar CAR constructs were tested for comparison. As shown in FIG. 10, only a CAR construct containing LAT and a CAR construct containing SLP-76, when co-expressed on T cells, induced cytokine (IL-2) expression by the T cells. By contrast, CAR combinations containing other proximal signaling molecules (e.g. LCK plus LAT, SLP-76 plus FYN, or other combinations shown in FIG. 10) had no activity. Thus, the combination of LAT and SLP-76 CARs was designed to co-opt the T cell signaling cascade and functions as a specific AND gate for signaling (FIGS. 8B and 11). A cartoon of T cells expressing this AND gate system, which specifically targets tumor cells expressing both antigens, is shown in FIG. 11. In short, a synthetic dependency for CAR T cell signaling was created, generating a system where T cell activation is dependent on two separate antigen specific inputs.

### Example 3

### Optimization of AND-Gate CAR Activity

[0296] This Example describes experiments performed to introduce modifications, mutations, and deletions to either LAT or SLP-76 CAR molecule to enhance the potency of the AND gate system only in response to dual antigens, without a substantial background activation in response to a single antigen.

[0297] The first iteration of the AND-gate CAR, described in the previous Example, demonstrated a potent cell activation after encounter of tumor cells expressing both target antigens. The system, however, still resulted in some background T-cell activation in response to a single antigen (termed “leakiness”, FIG. 12). The initial signaling molecule CARs contained a TM domain from CD28, which may bring the LAT and SLP-76 CARs together, by a homodimerization between their TM domains, for signaling in the absence of both antigens/absence of dual ligation. An exemplary system having a CD19−CD28H/TM-LAT and a HER2−CD28H/TM-SLP-76 CAR molecules was found to have a detectable background activation of T cells in response to either one of CD19 and HER2 antigens (FIG. 12). Similarly, this leakiness was found in other AND-gate CAR combinations containing a same TM domain in both CAR molecules, such as a pair of LAT/SLP-76 CAR molecules with a same CD8 or CD28 hinge/TM domain (FIG. 13). Such background activation induced IL-2 production by the T cells exposed to only a single antigen (FIG. 13, the bottom panel). T cells expressing the CAR molecules sharing a CD8 hinge/TM domain were leakier when exposed to HER2 than to CD19, while the cells expressing the CAR molecules sharing a CD28 hinge/TM domain were leakier when exposed to CD19 (FIG. 13, the bottom panel).

[0298] To produce improved AND-gate CAR systems which strongly recognize double antigen positive tumor cells with minimal leakiness, different TMs were introduced to the LAT and SLP-76 CARs. For example, each of CD8 hinge/TM and CD28 hinge/TM domains was used for constructing one of the AND-gate CAR molecules, resulting in a pair of exemplary CAR molecules of CD19−CD28H/TM-LAT and HER2−CD8H/TM-SLP-76, or CD19−CD8H/TM-LAT and HER2−CD28H/TM-SLP-76 (FIG. 14). T cells expressing CAR molecules having these mixed hinge/TM domains had a reduced leakiness in activation (as evidenced by IL-2 production), particularly when exposed to the HER2 antigen (the target of the SLP-76 CAR) (FIG. 15).

[0299] The CD28H/TM-LAT+CD8H/TM-SLP-76 CAR molecule combination was a first candidate for optimizing the AND gate. T cells expressing this candidate showed good cytotoxicity and cytokine production against double antigen positive cell lines, and no activity against HER2 single positive cells. However, some cytokine production against CD19 single positive cells was observed in vitro (FIG. 15). To address these issues, a number of mutations and hinge/transmembrane domain alterations were engineered.

[0300] Since CAR efficacy is largely dependent on the hinge/TM domain, mutations or alterations to the hinge/TM domain were prepared for their activity to modulate CAR functions. For example, CD4 hinge/TM or IgG4H/CD4TM were used to substitute the CD28 hinge/TM domain used in the CAR molecules described in previous Examples. T cell cytotoxicity experiments were performed for cells expressing CAR constructs for CD19-CD28H/TM-LAT, CD19−CD4H/TM-LAT, and CD19−IgG4H/CD4TM-LAT. As shown in FIG. 16, a LAT CAR with a CD4H/TM did not express, but a LAT CAR with a IgG4H/CD4TM did express and it reduced cell cytotoxicity, either when expressed alone (FIG. 16) or together with a SLP-76 CAR molecule to form an AND gate (FIG. 18). However, although this H/TM domain swap method reduced background cytotoxicity of LAT CAR molecules, these swapped constructs abrogated cytokine (e.g., IL-2) production by the T cells (FIG. 19). This loss of activity may be due to the fact that the CD28 hinge/TM domain is more effective for most CARs. Therefore, to compensate for this loss of activity with a controlled background activation, exemplary SLP-76 CAR molecules were engineered to, e.g., contain the CD28 hinge/TM domain. The CAR combinations of CD19−CD28H/TM-LAT and HER2−CD8H/TM-SLP-76, CD19−IgG4H/CD4TM-LAT and HER2−CD8H/TM-SLP-76, or CD19−IgG4H/CD4TM-LAT and HER2−CD28H/TM-SLP-76 were expressed in T cells (FIGS. 20A and 20B). IL-2 production by T cells expressing the last two CAR combinations were compared to show that the SLP-76 CAR molecule with a CD28H/TM domain, when co-expressed with the LAT CAR with a IgG4H/CD4TM domain, led to a low background T cell activation in response to single antigen (either CD19 or HER2) but a significant activation in response to CD19+HER2+ antigens (FIG. 20C). In cytotoxicity experiments, T cells expressing the CD19−IgG4H/CD4TM-LAT+HER2−CD28H/TM-SLP-76 combination showed almost no killing in response to either CD19 or HER2 single antigen, but an improved cytotoxicity to tumor cells expressing both antigens, compared to T cells expressing a CAR combination in which a SLP-76 CAR has a CD8 hinge/TM domain (FIG. 21).

[0301] As described above, a second AND gate combination candidate, CD19-IgG4H/CD4TM-LAT+HER2−CD28H/TM-SLP-76 was much less leaky to CD19 single positive tumor cells, but produced less IL-2 compared to the combinations in which a LAT CAR contained a CD28 H/TM domain. Thus, the system was further engineered to strengthen its activity in response to both antigens without compromising leakiness to a single antigen.

[0302] For strengthening SLP-76, a K30R mutation that was previously reported to reduce ubiquitination of SLP-76 is capable of enhancing downstream T cell activation. An exemplary SLP-76 CAR construct was prepared to contain the K30R mutation, resulting in a AND gate combination of CD19−IgG4H/CD4TM-LAT+HER2−CD28H/TM-SLP-76^{K30R} (FIGS. 22A and 22B). The single mutation K30R improved T cell activation (measured by IL-2 production in FIG. 22C) in response to double antigens and maintained no leakiness in response to single antigen.

[0303] On the LAT CAR side, strengthening LAT is not ideal because LAT CARs may sometimes kill cells on its own. However, a G160D mutation, known to enhance PLCG1 activation, was shown to enhance the AND-gate. An exemplary LAT CAR construct was prepared to contain the G160D mutation, resulting in an AND gate CAR combination of CD19−IgG4H/CD4TM-LAT^{G160D}+HER2−CD28H/TM-SLP-76 (FIGS. 23A and 23B). As shown in FIG. 23C, this G160D mutation greatly enhanced cytokine production against double positive cells, with limited leakiness against single antigen positive cells. In fact, with such enhancement, this combination has a specific activity comparable to the initial combination.

[0304] As described above, CD19−IgG4H/CD4TM-LAT^{G160D}+HER2−CD28H/TM-SLP-76 had excellent activity against double positive cell lines, and a small amount of leakiness on LAT antigen. When using LAT and SLP-76 constructs, AND-gates were leaky against CD19+ cells because LAT is presumably interacting with SLP-76 in some degree. Further engineering was performed to replace SLP-76 with costimulation molecules (CD28, CD2, FCgammaR1, CD5, CD6, or 4-1BB) known to associate with TCR signaling molecules and recruit SLP-76. LAT+CD5/CD6/4-1BB/FcgammaR1 combinations did not activate T cells to produce cytokine (FIGS. 24A and 24B) or to sufficiently kill tumor cells expressing the corresponding antigens (FIG. 24C). LAT+CD2 CAR combinations showed a high background activation in response to single antigen for the CD2 CAR molecule (FIGS. 25A and 25B) and did not promote T cells to sufficiently kill tumor cells expressing both antigens (FIG. 25C). By contrast, a combination having a CD28 CAR molecule substituting for the SLP-76 CAR and an IgG4H/CD4TM-LAT CAR molecule (FIG. 26A) showed minimal leakiness with good cytotoxicity on double positive cell lines (FIGS. 26B and 26C).

[0305] CARs incorporating a CD28-H/T demonstrate a more stable and efficient immunologic synapse (Majzner et. al, Cancer Discovery, 2020; 10:702-723). As an alternative to using an IgG4H/CD4TM domain on a LAT CAR, a CD28 H/TM domain was further mutated to substitute two cysteine residues to alanine residues (CD28H/TM^{2CA}). An AND-gate CAR combination containing a CD28H/TM^{2CA}-LAT had less leakiness when exposed to single antigen positive tumor cells but maintained good efficacy to double antigen positive cells (FIGS. 27A and 27B).

### Example 4

### Mechanistic Exploration to Further Optimize AND Gate CAR Activity

[0306] This Example describes experiments performed to introduce further modifications, mutations, and deletions to either LAT or SLP-76 CAR molecule to enhance the potency of the AND gate system only in response to dual antigens, without a substantial background activation in response to a single antigen.

[0307] The exemplary AND gate described in this application was rationally designed based on the role of SLP-76 and LAT in generating a scaffold from which T cell activity is directed. When expressed individually on T cells, the LAT CAR and SLP-76 CAR generate no cytokine response to target antigen encounter. Therefore, the source of leakiness in the system, as described in previous Examples, is related to the interaction of the two molecules when they are co-expressed on a single cell. LAT and SLP-76 interact with one another through adapter proteins such as GRB2 and GADS. Targeted mutations were prepared in each molecule that interrupt these interactions, which reduces the baseline aggregation of the CARs (in the absence of antigen) and thus reduces any leakiness in the system.

[0308] When mutations and deletions that abrogate GADS and GRB2 binding were introduced into the LAT and SLP-76 CAR constructs, leakiness or single antigen activity was eliminated. In particular, mutations such as Y200F/Y220F (LAT^{2YF}) or Y200F/Y220F/Y252F (LAT^{3YF}) on LAT or deletions such as Δ(200-262) on LAT (i.e., a deletion of amino acid residues from position 200 to position 262 of LAT; also as LAT^{200-262 del}) or Δ(224-244) on SLP-76 (also as SLP-76^{224-244 del}) greatly reduce the single antigen activity of the system, but still retain strong activity against double antigen positive tumor cells (see, e.g., FIGS. 28A and 28B for a SLP-76^{224-244 del} CAR alone or in combination with a LAT^{2YF} CAR; FIGS. 29A and 29B for a LAT^{200-262 del} CAR alone or in combination with a SLP-76^{224-244 del} CAR; FIGS. 30A-30C for a LAT^{2YF} (i.e., Y200F/Y220F) with a IgG4H/CD4TM CAR combined with a SLP-76^{224-244 del} CAR; FIGS. 31A-31C for a CD28H/TM^{2CA}-LAT^{2YF} CAR combined with a SLP-76^{224-244 del} CAR; and FIGS. 32A and 32B for a LAT 3YF (i.e., Y200F/Y220F/Y252F) CAR combined with a SLP-76^{224-244 del} CAR). In particular, when mutations that abrogate GADS binding are made on both LAT and SLP-76 CAR constructs, leakiness is minimized. This is demonstrated by both tumor cell killing and cytokine production by T cells. Additionally, unlike a LAT CAR with a CD28 H/TM domain, a LAT CAR with the GADS binding site deleted (LAT^{200-262 del}) with either a CD28H/TM or CD28H/TM^{2CA} does not demonstrate any degree of killing of tumor cells on its own (FIG. 57).

[0309] When mutations that abrogate GADS binding were combined with a hinge/transmembrane combination that minimized leakiness as well (using a LAT molecule with either a CD28 H/TM domain with mutated cysteine residues (FIGS. 31A-31C) or a IgG4H-CD4TM domain (FIGS. 30A-30C)), a system was achieved that demonstrated minimal to no background activity against one antigen (minimal ‘leakiness’), but maximal activity when both antigens are encountered.

[0310] An exemplary system with maximal potency against double antigen positive tumor cells and minimal activity against single antigen was achieved when combining truncations/deletions in LAT and SLP-76 that abrogate GADS binding with a hinge/transmembrane combination that minimizes leakiness by using a CD28H/TM^{2CA} on one molecule and a CD8H/TM on the other, as shown in FIGS. 38A-38C.

### Example 5

### Exemplary ZAP70 CAR Constructs with Different Extracellular Ligand/Antigen-Binding Domains, Costimulatory Domains, or Enhancing Mutations

[0311] This Example describes experiments performed to show further engineering to the ZAP70 CAR described in the instant application.

[0312] Different extracellular antigen-binding domains were engineered for the CAR molecules described herein. For example, ECDs specific for B7-H3 (CD276) or GD2 (HA=high affinity GD2 binder) may be used to construct a CAR molecule containing ZAP70. B7-H3 and GD2 specific (HA or standard GD2) ZAP70²⁵⁵⁻⁶⁰⁰ CAR molecules showed a reduced T cell exhaustion phenotype compared to traditional CARs containing CD3zeta and costimulatory molecule endodomains (FIGS. 33A-33C). FIG. 55 further shows that tonic-signaling GD2 or B7-H3-targeting CAR T cells bearing CARs with ZAP-70²⁵⁵⁻⁶⁰⁰ fragment endodomains produce lower baseline cytokine (IFNγ) in vitro, compared to CAR T cells with traditional 4-1BB-zeta endodomains, indicative of reduced effects of tonic signaling, a state that is usually detrimental to T cell function. On the other hand, for an ECD specific for CD19 that does not drive tonic signaling, there is no decrease in exhaustion markers by utilizing a ZAP70²⁵⁵⁻⁶⁰⁰ CAR because the traditional CARs containing CD3zeta and costimulatory molecule endodomains do not manifest signs of T cell exhaustion.

[0313] In a mouse model of xenograft neuroblastoma, B7-H3-ZAP70²⁵⁵⁻⁶⁰⁰ CARs outperformed traditional B7-H3-4-1BB-zeta CARs in controlling and eliminating tumor. Here, mice were injected with tumor cells intravenously in a metastatic model and then treated with MOCK (control) or T cells expressing B7-H3-4-1BBζ or B7-H3-ZAP70²⁵⁵⁻⁶⁰⁰ CAR constructs. As shown in FIGS. 34A-34E, B7-H3-truncated ZAP70 CAR-expressing T cells outperformed traditional CARs in tumor eradication. Similar advantage over 4-1BB-zeta CARs were identified for ZAP-70²⁵⁵⁻⁶⁰⁰ CARs, when using scFvs prone to tonic signaling (B7-H3 and GD2), in animal models involving diffuse intrinsic pontine glioma 6 xenografts (DIPG-6) (FIG. 39 and FIG. 40), and an animal model involving leukemia xenografts (GD2⁺-Nalm6) (FIG. 41). In all of these models, T cells recovered from mice at endpoint or specific timepoints demonstrated enhanced expansion and persistence of CAR T cells containing ZAP-70²⁵⁵⁻⁶⁰⁰ endodomains.

[0314] ZAP70 CAR-expressing T cells can be further enhanced through targeted mutations. In one instance, mutations such as Y292F, Y492F, K544R, and Y597F+Y598F can be introduced in the ZAP70 interdomain B, resulting in enhanced cytokine production in response to tumor cells (FIG. 35). Similarly, mutations such as V314A, D327P, R360P, and K362E also enhanced cytokine production in response to tumor cells (FIG. 42).

[0315] Additionally, ZAP70 CAR T cells can be further enhanced through integration of costimulatory domains. For instance, a 4-1BB costimulatory domain was introduced into a CAR construct, resulting in enhanced cytokine production in response to tumor cells (FIG. 36). In addition, combining enhancing mutations (e.g., Y292F) with costimulatory domains further enhanced the anti-tumor activity (e.g., measured by cytokine production levels) of the ZAP70 CAR molecules (FIG. 43). Costimulatory domains and enhancing mutations can be added to improve the potency of T cells bearing CARs containing ZAP-70²⁵⁵⁻⁶⁰⁰ fragment endodomains and non-tonic signaling scFvs to achieve enhanced potency (FIG. 44).

[0316] Different ZAP70 fragments were engineered for the CAR molecules described herein. For example, compared to ZAP70²⁵⁵⁻⁶⁰⁰ fragment endodomains illustrated in previous Examples, further truncated ZAP70 fragments were used in the CAR molecules. One exemplary advantage of these further truncated CAR molecules is their decreased packing size, without compromising efficacy. Exemplary CAR molecules comprising shorter ZAP70 fragments (e.g., ZAP-70²⁸⁰⁻⁶⁰⁰ and ZAP-70³⁰⁸⁻⁶⁰⁰) showed comparable activities to the ZAP-70²⁵⁵⁻⁶⁰⁰ CAR molecule in promoting cytokine production and cytotoxicity (FIG. 45).

[0317] Activity of ZAP70 CARs does not depend on endogenous CD3zeta, as demonstrated after using CRISPR-Cas9 to knock out the native TCR in T cells bearing ZAP70 CARs, which performed equivalently to unedited T cells (FIG. 37).

### Example 6

### Discussion

[0318] A major advance of the discovery described herein is that it opens a landscape of potential antigens that may be shared with normal tissues for targeting by CARs. To date, there has been insufficient exploration of novel targets for solid tumor CARs and many current CAR targets are those that were already known as potential targets for antibody therapeutics (e.g. HER2, GD2, EGFR, B7-H3 etc.). With a system capable of discriminating normal tissue from tumor cells through recognition of antigen combinations, the work of what constitutes a tumor target antigen needs to be revisited.

[0319] The proximal signaling molecule CARs described herein (ZAP70, PLCG1, LAT/SLP-76, etc.) challenge the dominant paradigm that CAR T cell activity can only be initiated with CD3zeta. This work reorients the field and demonstrates the continued need to expand the CAR toolbox to include additional molecules that can activate immune cell effector functions. The pursuit of signaling molecules for CARs not only allows for more advanced Boolean logic receptors, but also has many additional potential benefits. For instance, incorporation of different signaling domains may help alleviate T cell exhaustion, a state of dysfunction that can develop with certain CARs. While a B7-H3 CAR with a traditional architecture (containing 4-1BB and CD3zeta signaling domains) expresses high levels of T cell exhaustion markers in the absence of antigen, a B7-H3-ZAP70 CAR expresses much lower levels of exhaustion markers (FIG. 33) and mediates improved anti-tumor control in a xenograft models of neuroblastoma, diffuse intrinsic pontine glioma, and leukemia (FIG. 34).

[0320] Additionally, use of different signaling molecules may help preventing major toxicities of CAR T cell therapies. The current generation of CAR T cells secretes large quantities of inflammatory cytokines that cause toxicity (called cytokine release syndrome) in patients. Alternative signaling pathways may restrict activity of CAR T cells to tumor cell killing without a production of high levels of cytokines, presenting a potential advantage. For instance, T cells expressing CAR constructs described herein may produce less cytokine in response to tumor than traditional CARs containing CD3zeta domains, but maintain their in vivo cytotoxicity activity.

[0321] While particular alternatives of the present disclosure have been disclosed, it is to be understood that various modifications and combinations are possible and are contemplated within the true spirit and scope of the appended claims. There is no intention, therefore, of limitations to the exact abstract and disclosure herein presented.

### Example 7

### Further Characterization of Exemplary AND Gate CAR Constructs

[0322] This Example describes experiments performed to show further engineering to the AND Gate CAR constructs described in the instant application.

[0323] LINK CARs bearing one tonic-signaling scFv, described herein, do not show phenotypical characteristics of exhaustion. For example, T cells with LAT/SLP-76 CARs bearing B7-H3 or GD2 scFvs show less exhausted phenotypes compared to traditional B7-H3 or GD2-4-1BBzeta CAR T cells (FIG. 46).

[0324] Either LAT CAR or SLP-76 CAR molecules of the AND Gate CAR system described herein can be further modified for optimization. For example, the LAT CAR (FIGS. 47A-47C) and the SLP-76 CAR (FIGS. 48A-48C) can be further truncated to reduce the packaging size, without negatively effecting efficacy. Exemplary shorter LAT domains include LAT^{28-90del, 200-262del} and LAT^{28-130del, 200-262del}. Exemplary shorter SLP-76 domains include SLP-76^{1-81del, 224-244del}, SLP-76^{224-265del}, and SLP-76^{224-300del}.

[0325] The AND Gate CAR systems described herein can be used to treat multiple diseases, such as cancers. Exemplary cancers may include ROR1+/CD19+ tumor cells. Expression of endogenous ROR1 on human and murine tissues is illustrated in FIGS. 49A-49B. This analysis revealed that the lungs are the most prominent site of ROR1 expression in these datasets. The mouse lung single-cell dataset from Raredon et al. Sci. Adv. (2019). doi:10.1126/sciadv.aaw3851 was also queried through the online web tool at World Wide Web site lungconnectome.net, which showed ROR1 expression on alveolar type II cells, pericytes (Peri), smooth muscle cells (SMCs), Col14a1+ fibroblasts (Fib_col14a1+), Col13a1+ fibroblasts (Fib_col13a1+), and mesothelial stromal cells (Meso) (from Raredon et al., 2019).

[0326] FIG. 50 shows an exemplary investigation of the capability of the LAT/SLP-76 AND Gate CAR molecules described herein to target ROR1⁺/CD19⁺ tumor cells in a murine model. CAR T cells primed to recognize ROR1 on ROR1+ tumor cells can also bind ROR1 on normal, endogenous tissues, resulting in killing of non-tumor cells and potential adverse side effects. As shown in FIGS. 51A-51B, LAT/SLP-76 CARs can selectively target ROR1⁺/CD19⁺ tumor cells without on-target, off-tumor leakiness. In mice, on-target, off-tumor toxicity due to ROR1 recognition of ROR1 on normal mouse tissues is manifested by weight loss. FIGS. 52A-52C show that different ROR1/CD-19-targeting LAT/SLP-76 CARs have different capacities of reducing tumor size and improving animal survival, while the traditional ROR1−CD28zeta CAR kills the animal quickly due to weight loss. Several combinations of ROR1/CD-19-targeting LAT/SLP-76 CAR mediate complete tumor clearance in the absence of any toxicity. Different ROR1 or CD-19-targeting LAT/SLP-76 CAR combinations were used in FIGS. 53A-53B, showing tumor eradication and improved survival with the LAT/SLP-76 CAR combinations compared to a standard ROR1−CD28zeta CAR. The ROR1/CD-19-targeting LAT/SLP-76 CAR was compared to several other AND gate systems (SPLIT CAR from Kloss et al. Nat Biotechnol. 2013; 31:71-75 and Syn-Notch from Roybal et al. Cell. 2016; 164:770-779. The SPLIT CAR system was ineffective in controlling tumor. The Syn-Notch system did not prevent on-target recognition of ROR1 on normal mouse tissues (and caused toxicity), while the ROR1/CD-19-targeting LAT/SLP-76 CAR mediated complete tumor clearance and no signs of toxicity (FIGS. 54A-54C).

### Example 8

### Treg Therapy Using CAR Construct and/or AND Gate CAR Constructs

[0327] This Example describes methods that can be used to produce regulatory T cells (Tregs) expressing the CAR molecules and/or the AND Gate CAR constructs described herein. Such CAR-Tregs can be used for immunotherapy for various diseases or disorder. However, one skilled in the art will appreciate that methods that deviate from these specific methods can also be used to successfully produce and/or use such CAR-Tregs for treatment.

[0328] Regulatory T cells (Tregs) are a subset of T cells that function to maintain homeostasis and prevent autoimmunity (1). Tregs make up 5-10% of the CD4+ T cell population (2) and are characterized by co-expression of CD4, CD25, the transcription factor Forkhead box protein 3 (FOXP3) and low levels of CD127. Tregs suppress the immune system by different mechanisms including contact-dependent mechanisms, through CTLA-4 engagement for example, and contact-independent, such as the release of cytokines e.g., IL-35 or IL-10. Given their proven role in preventing autoimmune diseases, Tregs may have potential in the promotion of tolerance. Although human Tregs constitute a small proportion of circulating CD4+ T cells, they are attractive candidates for immunotherapeutic purposes given that they can be isolated, manipulated and expanded in large numbers in vitro. Tregs can be applied in the treatment of autoimmune diseases and in the prevention of transplant rejection and graft vs. host disease (GvHD). For reviews on Treg therapy, see Zhang et al., Front. Immunol., 2018; 9:2359. doi: 10.3389/fimmu.2018.02359 and Mohseni et al., Front. Immunol. 2020; 11:1608. doi: 10.3389/fimmu.2020.01608.

[0329] CAR molecules, e.g., those described herein, may be introduced into Tregs to produce antigen-specific CAR-Treg cells (CAR-Tregs). Tregs expressing specific CAR molecules described herein, such as those in the sequence tables below and elsewhere in the specification (e.g., Examples) and/or figures, may be activated after specifically recognizing target cells (e.g., cancer/tumor cells) expressing antigen(s) recognizable by the ECD(s) of the CAR molecules or CAR molecule combinations (e.g., the AND Gate constructs). Activation of the CAR-Tregs may lead to production of cytokines and/or inhibit or kill target cells through cytotoxicity, with minimal off-target and/or on-target, off-tumor side effects and minimal T cell exhaustion.

[0330] In one exemplary experiment, Treg cells (e.g., collected by isolation and/or expansion from subject samples or healthy donors) can be genetically engineered (e.g., transduced or transformed or transfected) with, for example, a vector construct of the present application including for example, a viral vector or an expression vector for the expression of the CAR polypeptides of interest, using the methods described herein or in common knowledge in the art known by a skilled artisan.

[0331] In another exemplary experiment, animals carrying certain cells expressing specific antigen(s) are treated (e.g., injected intravenously or subcutaneously) by the CAR-Treg cells described herein. Compared to mock treatment (such as constructs that are designed not to work or have specificity toward irrelevant target), CAR-Tregs are capable to specifically inhibit immune cells at the organ site of disease that expresses specific antigen(s), with minimal off-target and/or on-target, off-tumor side effects and minimal T cell exhaustion.

[0332] In another exemplary experiment, a subject (e.g., a human having an autoimmune disease) is treated (e.g., by administering a retroviral vector) with the CAR-Treg cells described herein in a dosage regimen disclosed herein or determined by a physician. CAR-Tregs are capable to inhibit and/or kill the autoimmune cells located at an organ site expressing specific antigen(s) in the subject, with minimal off-target and/or on-target, off-tumor side effects and minimal T cell exhaustion, thus treating the subject and/or ameliorating at least one symptom of the autoimmune disease.

[0333] LINK T-REG Enables Specific Activity at Organ Sties of Auto-Immunity

[0334] In another exemplary experiment, a system depicted as LINK T-REG is used to treat autoimmune diseases. Regulatory T cells are T cells that adapt a suppressive phenotype. T-regs can be redirected with a CAR to suppress self-reactive T cells and other self-reactive immune cells at an organ site of autoimmunity. This approach can treat autoimmune disorders. However, CAR Tregs have the potential to cause off-target immune suppression in organs that are not affected by the autoimmune condition because a CAR with a single antigen specificity may not be specific solely to the organ of involvement. Immune suppression by CAR T-regs outside the organ of interest can cause major infectious complications and unwanted immune suppression. This can be overcome by utilizing LINK T-REGs in which the LINK AND-gate system (e.g., the AND Gate system described in the present application) is deployed in a T-reg, as shown in FIG. 56. Specially, regulatory T cells are obtained from any method known to a skilled artisan, including, e.g., a) directly from patient blood or apheresis, b) using cytokines to differentiate peripherally obtained T cells to a T-reg phenotype, or c) reprogramming cells through overexpression of transcription factors such a FOXP3. These T-regs are transduced with one or several vectors that drive expression of SLP-76 and LAT CARs described herein. The LAT CAR and SLP-76 CAR target different antigens that specifically expressed on an organ-site of autoimmunity, thus leading to more specific activation of the T-regs than any single antigen can. This system is depicted as LINK T-REG. The combination of the two specificities (listed as Antigen 1 and Antigen 2) with LINK T-REG allows for specific targeting of the organ site of autoimmune disease and treatment of this autoimmune condition.

### Sequence Tables

[0335] The tables below lists exemplary sequences for CAR molecules described herein.

TABLE 1
Amino acid sequences for domains of and full-length exemplary CAR constructs

| | | | (Optional | |
|---|---|---|---|---|
| | | | costimulatory | |
| | | | domain amino | |
| | | | acid sequence) + | |
| | | | Intracellular | |
| | ECD domain | Hinge/TM | signaling | Full-length |
| | amino acid | domain amino | domain amino | construct amino |
| Construct name | sequence | acid sequence | acid sequence | acid sequence |
| HER2-CD28H/TM-SLP-76 | SEQ ID NO: 1 | SEQ ID NO: 6 | SEQ ID NO: 11 | SEQ ID NO: 27 |
| HER2-CD28H/TM-Fyn | SEQ ID NO: 1 | SEQ ID NO: 6 | SEQ ID NO: 12 | SEQ ID NO: 28 |
| CD19-CD28H/TM-LAT | SEQ ID NO: 2 | SEQ ID NO: 6 | SEQ ID NO: 13 | SEQ ID NO: 29 |
| CD19-CD28H/TM-Lck | SEQ ID NO: 2 | SEQ ID NO: 6 | SEQ ID NO: 14 | SEQ ID NO: 30 |
| HER2-CD28H/TM-ZAP70²⁵⁵⁻⁶⁰⁰ | SEQ ID NO: 1 | SEQ ID NO: 6 | SEQ ID NO: 15 | SEQ ID NO: 31 |
| HER2-CD28H/TM-PLCG1 | SEQ ID NO: 1 | SEQ ID NO: 6 | SEQ ID NO: 16 | SEQ ID NO: 32 |
| CD19-CD8H/TM-LAT | SEQ ID NO: 2 | SEQ ID NO: 7 | SEQ ID NO: 13 | SEQ ID NO: 33 |
| HER2-CD8H/TM-SLP76 | SEQ ID NO: 1 | SEQ ID NO: 7 | SEQ ID NO: 11 | SEQ ID NO: 34 |
| CD19-CD28H/TM-LAT^{Y161F} | SEQ ID NO: 2 | SEQ ID NO: 6 | SEQ ID NO: 17 | SEQ ID NO: 35 |
| CD19-CD28H/TM-LAT^{Y200F} | SEQ ID NO: 2 | SEQ ID NO: 6 | SEQ ID NO: 18 | SEQ ID NO: 36 |
| CD19- IgG4H/CD4TM-LAT^{G160D} | SEQ ID NO: 2 | SEQ ID NO: 8 | SEQ ID NO: 19 | SEQ ID NO: 37 |
| CD19-CD4H/TM-LAT | SEQ ID NO: 2 | SEQ ID NO: 9 | SEQ ID NO: 13 | SEQ ID NO: 38 |
| CD19-IgG4H/CD4TM-LAT | SEQ ID NO: 2 | SEQ ID NO: 8 | SEQ ID NO: 13 | SEQ ID NO: 39 |
| HER2-CD28H/TM-SLP-76^{K30R} | SEQ ID NO: 1 | SEQ ID NO: 6 | SEQ ID NO: 20 | SEQ ID NO: 40 |
| HER2-CD28H/TM-CD5 | SEQ ID NO: 1 | SEQ ID NO: 6 | SEQ ID NO: 21 | SEQ ID NO: 41 |
| HER2-CD28H/TM-CD6 | SEQ ID NO: 1 | SEQ ID NO: 6 | SEQ ID NO: 22 | SEQ ID NO: 42 |
| HER2-CD28H/TM-FcγR1 | SEQ ID NO: 1 | SEQ ID NO: 6 | SEQ ID NO: 23 | SEQ ID NO: 43 |
| HER2-CD28H/TM-4-1BB | SEQ ID NO: 1 | SEQ ID NO: 6 | SEQ ID NO: 24 | SEQ ID NO: 44 |
| HER2-CD28H/TM-CD28 | SEQ ID NO: 1 | SEQ ID NO: 6 | SEQ ID NO: 25 | SEQ ID NO: 45 |
| HER2-CD28H/TM-CD2 | SEQ ID NO: 1 | SEQ ID NO: 6 | SEQ ID NO: 26 | SEQ ID NO: 46 |
| HA-IgG1 long-CD28H/TM-ZAP70²⁵⁵⁻⁶⁰⁰ | SEQ ID NO: 3 | SEQ ID NO: 10 | SEQ ID NO: 15 | SEQ ID NO: 47 |
| B7-H3-CD28H/TM- ZAP70²⁵⁵⁻⁶⁰⁰ | SEQ ID NO: 4 | SEQ ID NO: 6 | SEQ ID NO: 15 | SEQ ID NO: 48 |
| CD22-CD8H/TM-LAT | SEQ ID NO: 5 | SEQ ID NO: 7 | SEQ ID NO: 13 | SEQ ID NO: 49 |
| CD19-CD28H/TM^{2CA}-LAT | SEQ ID NO: 2 | SEQ ID NO: 102 | SEQ ID NO: 13 | SEQ ID NO: 111 |
| CD19-CD28H/TM-LAT^{2YF} | SEQ ID NO: 2 | SEQ ID NO: 6 | SEQ ID NO: 103 | SEQ ID NO: 112 |
| CD19-IgG4H-CD4TM-LAT^{2YF} | SEQ ID NO: 2 | SEQ ID NO: 8 | SEQ ID NO: 103 | SEQ ID NO: 113 |
| CD19-CD28H/TM-LAT^{200-262 del} | SEQ ID NO: 2 | SEQ ID NO: 6 | SEQ ID NO: 104 | SEQ ID NO: 114 |
| CD19-CD28H/TM^{2CA}-LAT^{2YF} | SEQ ID NO: 2 | SEQ ID NO: 102 | SEQ ID NO: 103 | SEQ ID NO: 115 |
| CD19-CD28H/TM^{2CA}-LAT^{200-262 del} | SEQ ID NO: 2 | SEQ ID NO: 102 | SEQ ID NO: 104 | SEQ ID NO: 116 |
| CD19-CD28H/TM-LAT^{3YF} | SEQ ID NO: 2 | SEQ ID NO: 6 | SEQ ID NO: 105 | SEQ ID NO: 117 |
| HER2-CD8H/TM-SLP-76^{224-244 del} | SEQ ID NO: 1 | SEQ ID NO: 7 | SEQ ID NO: 106 | SEQ ID NO: 118 |
| HER2-CD28H/TM-SLP-76^{224-244 del} | SEQ ID NO: 1 | SEQ ID NO: 6 | SEQ ID NO: 106 | SEQ ID NO: 119 |
| B7-H3-CD28H/TM-ZAP70^{255-600 Y292F} | SEQ ID NO: 4 | SEQ ID NO: 6 | SEQ ID NO: 107 | SEQ ID NO: 120 |
| B7-H3-CD28H/TM-ZAP70^{255-600 Y492F} | SEQ ID NO: 4 | SEQ ID NO: 6 | SEQ ID NO: 108 | SEQ ID NO: 121 |
| B7-H3-CD28H/TM-ZAP70^{255-600 K544R} | SEQ ID NO: 4 | SEQ ID NO: 6 | SEQ ID NO: 109 | SEQ ID NO: 122 |
| B7-H3-CD28H/TM-ZAP70^{255-600 Y597F Y598F} | SEQ ID NO: 4 | SEQ ID NO: 6 | SEQ ID NO: 110 | SEQ ID NO: 123 |
| B7-H3-CD28H/TM-4-1BB-ZAP70²⁵⁵⁻⁶⁰⁰ | SEQ ID NO: 4 | SEQ ID NO: 6 | (SEQ ID NO: 146) + | SEQ ID NO: 148 |
| | | | SEQ ID NO: 15 | |
| B7-H3-CD28H/TM-CD28-ZAP70²⁵⁵⁻⁶⁰⁰ | SEQ ID NO: 4 | SEQ ID NO: 6 | (SEQ ID NO: 147) + | SEQ ID NO: 149 |
| | | | SEQ ID NO: 15 | |
| CD19-CD28H/TM-ZAP70²⁵⁵⁻⁶⁰⁰ | SEQ ID NO: 2 | SEQ ID NO: 6 | SEQ ID NO: 15 | SEQ ID NO: 150 |
| CD19-CD28H/TM-PLCG1 | SEQ ID NO: 2 | SEQ ID NO: 6 | SEQ ID NO: 16 | SEQ ID NO: 151 |
| GD2-8h/tm-ZAP70 (255-600) | SEQ ID NO: 161 | SEQ ID NO: 7 | SEQ ID NO: 15 | SEQ ID NO: 162 |
| B7-H3-28h/tm-ZAP70 (255-600 V314A) | SEQ ID NO: 4 | SEQ ID NO: 6 | SEQ ID NO: 163 | SEQ ID NO: 164 |
| B7-H3-28h/tm-ZAP70 (255-600 D327P) | SEQ ID NO: 4 | SEQ ID NO: 6 | SEQ ID NO: 165 | SEQ ID NO: 166 |
| B7-H3-28h/tm-ZAP70 (255-600 R360P) | SEQ ID NO: 4 | SEQ ID NO: 6 | SEQ ID NO: 167 | SEQ ID NO: 168 |
| B7-H3-28h/tm-ZAP70 (255-600 K362E) | SEQ ID NO: 4 | SEQ ID NO: 6 | SEQ ID NO: 169 | SEQ ID NO: 170 |
| B7-H3-28h/tm-4-1BB-ZAP70 (255-600 | SEQ ID NO: 4 | SEQ ID NO: 6 | (SEQ ID NO: 146) + | SEQ ID NO: 171 |
| Y292F) | | | SEQ ID NO: 107 | |
| CD19-28h/tm-ZAP70 (255-600 Y292F) | SEQ ID NO: 2 | SEQ ID NO: 6 | SEQ ID NO: 107 | SEQ ID NO: 172 |
| CD19-28h/tm-CD28-ZAP70 (255-600) | SEQ ID NO: 2 | SEQ ID NO: 6 | (SEQ ID NO: 147) + | SEQ ID NO: 173 |
| | | | SEQ ID NO: 15 | |
| CD19-28h/tm-4-1BB-ZAP70 (255-600) | SEQ ID NO: 2 | SEQ ID NO: 6 | (SEQ ID NO: 146) + | SEQ ID NO: 174 |
| | | | SEQ ID NO: 15 | |
| CD19-28h/tm-CD28-ZAP70 (255-600 | SEQ ID NO: 2 | SEQ ID NO: 6 | (SEQ ID NO: 147) + | SEQ ID NO: 175 |
| Y292F) | | | SEQ ID NO: 107 | |
| CD19-28h/tm-4-1BB-ZAP70 (255-600 | SEQ ID NO: 2 | SEQ ID NO: 6 | (SEQ ID NO: 146) + | SEQ ID NO: 176 |
| Y292F) | | | SEQ ID NO: 107 | |
| B7-H3-28h/tm-ZAP70 (280-600) | SEQ ID NO: 4 | SEQ ID NO: 6 | SEQ ID NO: 177 | SEQ ID NO: 178 |
| B7-H3-28h/tm-ZAP70 (308-600) | SEQ ID NO: 4 | SEQ ID NO: 6 | SEQ ID NO: 179 | SEQ ID NO: 180 |
| B7-H3-28h/tm-LAT | SEQ ID NO: 4 | SEQ ID NO: 6 | SEQ ID NO: 13 | SEQ ID NO: 181 |
| B7-H3-8h/tm-SLP-76 | SEQ ID NO: 4 | SEQ ID NO: 7 | SEQ ID NO: 11 | SEQ ID NO: 182 |
| GD2-28h/tm-LAT | SEQ ID NO: 161 | SEQ ID NO: 6 | SEQ ID NO: 13 | SEQ ID NO: 183 |
| GD2-8h/tm-SLP-76 | SEQ ID NO: 161 | SEQ ID NO: 7 | SEQ ID NO: 11 | SEQ ID NO: 184 |
| CD19-28h/tm-LAT (28-90del, 200-262del) | SEQ ID NO: 2 | SEQ ID NO: 6 | SEQ ID NO: 185 | SEQ ID NO: 186 |
| CD19-28h/tm(2CA)-LAT (28-90del, 200- | SEQ ID NO: 2 | SEQ ID NO: 102 | SEQ ID NO: 185 | SEQ ID NO: 187 |
| 262del) | | | | |
| CD19-28h/tm-LAT (28-130del, 200- | SEQ ID NO: 2 | SEQ ID NO: 6 | SEQ ID NO: 188 | SEQ ID NO: 189 |
| 262del) | | | | |
| CD19-28h/tm(2CA)-LAT (28-130del, 200- | SEQ ID NO: 2 | SEQ ID NO: 102 | SEQ ID NO: 188 | SEQ ID NO: 190 |
| 262del) | | | | |
| HER2-8h/tm-SLP-76 (1-81del, 224-244del) | SEQ ID NO: 1 | SEQ ID NO: 7 | SEQ ID NO: 191 | SEQ ID NO: 192 |
| HER2-8h/tm-SLP-76 (224-265del) | SEQ ID NO: 1 | SEQ ID NO: 7 | SEQ ID NO: 193 | SEQ ID NO: 194 |
| HER2-8h/tm-SLP-76 (1-81del, 224- | SEQ ID NO: 1 | SEQ ID NO: 7 | SEQ ID NO: 195 | SEQ ID NO: 196 |
| 300del)) | | | | |
| ROR1-28h/tm-LAT | SEQ ID NO: 197 | SEQ ID NO: 6 | SEQ ID NO: 13 | SEQ ID NO: 198 |
| ROR1-28h/tm(2CA)-LAT | SEQ ID NO: 197 | SEQ ID NO: 102 | SEQ ID NO: 13 | SEQ ID NO: 199 |
| ROR1-28h/tm-LAT (200-262del) | SEQ ID NO: 197 | SEQ ID NO: 6 | SEQ ID NO: 104 | SEQ ID NO: 200 |
| ROR1-28h/tm(2CA)-LAT (200-262del) | SEQ ID NO: 197 | SEQ ID NO: 102 | SEQ ID NO: 104 | SEQ ID NO: 201 |
| CD19-8h/tm-SLP-76 (224-244del) | SEQ ID NO: 2 | SEQ ID NO: 7 | SEQ ID NO: 106 | SEQ ID NO: 202 |
| ROR1-8h/tm-SLP-76 | SEQ ID NO: 197 | SEQ ID NO: 7 | SEQ ID NO: 11 | SEQ ID NO: 203 |
| ROR1-8h/tm-SLP-76 (224-244del) | SEQ ID NO: 197 | SEQ ID NO: 7 | SEQ ID NO: 106 | SEQ ID NO: 204 |

TABLE 2
Nucleic acid sequences for domains of and full-length exemplary CAR constructs

| | | | (Optional | |
|---|---|---|---|---|
| | | | costimulatory | |
| | | | domain nucleic | |
| | | | acid sequence) + | |
| | | | Intracellular | |
| | ECD domain | Hinge/TM | signaling | Full-length |
| | nucleic acid | domain nucleic | domain nucleic | nucleic acid |
| Construct name | sequence | acid sequence | acid sequence | sequence |
| HER2-CD28H/TM-SLP-76 | SEQ ID NO: 50 | SEQ ID NO: 55 | SEQ ID NO: 60 | SEQ ID NO: 76 |
| HER2-CD28H/TM-Fyn | SEQ ID NO: 50 | SEQ ID NO: 55 | SEQ ID NO: 61 | SEQ ID NO: 77 |
| CD19-CD28H/TM-LAT | SEQ ID NO: 51 | SEQ ID NO: 55 | SEQ ID NO: 62 | SEQ ID NO: 78 |
| CD19-CD28H/TM-Lck | SEQ ID NO: 51 | SEQ ID NO: 55 | SEQ ID NO: 63 | SEQ ID NO: 79 |
| HER2-CD28H/TM-ZAP70²⁵⁵⁻⁶⁰⁰ | SEQ ID NO: 50 | SEQ ID NO: 55 | SEQ ID NO: 64 | SEQ ID NO: 80 |
| HER2-CD28H/TM-PLCG1 | SEQ ID NO: 50 | SEQ ID NO: 99 | SEQ ID NO: 65 | SEQ ID NO: 81 |
| CD19-CD8H/TM-LAT | SEQ ID NO: 51 | SEQ ID NO: 56 | SEQ ID NO: 62 | SEQ ID NO: 82 |
| HER2-CD8H/TM-SLP76 | SEQ ID NO: 50 | SEQ ID NO: 56 | SEQ ID NO: 60 | SEQ ID NO: 83 |
| CD19-CD28H/TM-LAT^{Y161F} | SEQ ID NO: 51 | SEQ ID NO: 55 | SEQ ID NO: 66 | SEQ ID NO: 84 |
| CD19-CD28H/TM-LAT^{Y200F} | SEQ ID NO: 51 | SEQ ID NO: 55 | SEQ ID NO: 67 | SEQ ID NO: 85 |
| CD19- IgG4H/CD4TM-LAT^{G160D} | SEQ ID NO: 51 | SEQ ID NO: 57 | SEQ ID NO: 68 | SEQ ID NO: 86 |
| CD19-CD4H/TM-LAT | SEQ ID NO: 51 | SEQ ID NO: 58 | SEQ ID NO: 62 | SEQ ID NO: 87 |
| CD19-IgG4H/CD4TM-LAT | SEQ ID NO: 51 | SEQ ID NO: 57 | SEQ ID NO: 62 | SEQ ID NO: 88 |
| HER2-CD28H/TM-SLP-76^{K30R} | SEQ ID NO: 50 | SEQ ID NO: 55 | SEQ ID NO: 69 | SEQ ID NO: 89 |
| HER2-CD28H/TM-CD5 | SEQ ID NO: 50 | SEQ ID NO: 55 | SEQ ID NO: 70 | SEQ ID NO: 90 |
| HER2-CD28H/TM-CD6 | SEQ ID NO: 50 | SEQ ID NO: 55 | SEQ ID NO: 71 | SEQ ID NO: 91 |
| HER2-CD28H/TM-FcγR1 | SEQ ID NO: 50 | SEQ ID NO: 55 | SEQ ID NO: 72 | SEQ ID NO: 92 |
| HER2-CD28H/TM-4-1BB | SEQ ID NO: 50 | SEQ ID NO: 55 | SEQ ID NO: 73 | SEQ ID NO: 93 |
| HER2-CD28H/TM-CD28 | SEQ ID NO: 50 | SEQ ID NO: 100 | SEQ ID NO: 74 | SEQ ID NO: 94 |
| HER2-CD28H/TM-CD2 | SEQ ID NO: 50 | SEQ ID NO: 101 | SEQ ID NO: 75 | SEQ ID NO: 95 |
| HA-IgG1 long-CD28H/TM-ZAP70²⁵⁵⁻⁶⁰⁰ | SEQ ID NO: 52 | SEQ ID NO: 59 | SEQ ID NO: 64 | SEQ ID NO: 96 |
| B7-H3-CD28H/TM- ZAP70²⁵⁵⁻⁶⁰⁰ | SEQ ID NO: 53 | SEQ ID NO: 55 | SEQ ID NO: 64 | SEQ ID NO: 97 |
| CD22-CD8H/TM-LAT | SEQ ID NO: 54 | SEQ ID NO: 56 | SEQ ID NO: 62 | SEQ ID NO: 98 |
| CD19-CD28H/TM^{2CA}-LAT | SEQ ID NO: 51 | SEQ ID NO: 124 | SEQ ID NO: 62 | SEQ ID NO: 133 |
| CD19-CD28H/TM-LAT^{2YF} | SEQ ID NO: 51 | SEQ ID NO: 55 | SEQ ID NO: 125 | SEQ ID NO: 134 |
| CD19-IgG4H-CD4TM-LAT^{2YF} | SEQ ID NO: 51 | SEQ ID NO: 57 | SEQ ID NO: 125 | SEQ ID NO: 135 |
| CD19-CD28H/TM-LAT^{200-262 del} | SEQ ID NO: 51 | SEQ ID NO: 55 | SEQ ID NO: 126 | SEQ ID NO: 136 |
| CD19-CD28H/TM^{2CA}-LAT^{2YF} | SEQ ID NO: 51 | SEQ ID NO: 124 | SEQ ID NO: 125 | SEQ ID NO: 137 |
| CD19-CD28H/TM^{2CA}-LAT^{200-262 del} | SEQ ID NO: 51 | SEQ ID NO: 124 | SEQ ID NO: 126 | SEQ ID NO: 138 |
| CD19-CD28H/TM-LAT^{3YF} | SEQ ID NO: 51 | SEQ ID NO: 55 | SEQ ID NO: 127 | SEQ ID NO: 139 |
| HER2-CD8H/TM-SLP-76^{224-244 del} | SEQ ID NO: 50 | SEQ ID NO: 56 | SEQ ID NO: 128 | SEQ ID NO: 140 |
| HER2-CD28H/TM-SLP-76^{224-244 del} | SEQ ID NO: 50 | SEQ ID NO: 55 | SEQ ID NO: 128 | SEQ ID NO: 141 |
| B7-H3-CD28H/TM-ZAP70^{255-600 Y292F} | SEQ ID NO: 53 | SEQ ID NO: 55 | SEQ ID NO: 129 | SEQ ID NO: 142 |
| B7-H3-CD28H/TM-ZAP70^{255-600 Y492F} | SEQ ID NO: 53 | SEQ ID NO: 55 | SEQ ID NO: 130 | SEQ ID NO: 143 |
| B7-H3-CD28H/TM-ZAP70^{255-600 K544R} | SEQ ID NO: 53 | SEQ ID NO: 55 | SEQ ID NO: 131 | SEQ ID NO: 144 |
| B7-H3-CD28H/TM-ZAP70^{255-600 Y597F Y598F} | SEQ ID NO: 53 | SEQ ID NO: 55 | SEQ ID NO: 132 | SEQ ID NO: 145 |
| B7-H3-CD28H/TM-4-1BB-ZAP70²⁵⁵⁻⁶⁰⁰ | SEQ ID NO: 53 | SEQ ID NO: 153 | (SEQ ID NO: 154) + | SEQ ID NO: 157 |
| | | | SEQ ID NO: 156 | |
| B7-H3-CD28H/TM-CD28-ZAP70²⁵⁵⁻⁶⁰⁰ | SEQ ID NO: 53 | SEQ ID NO: 100 | (SEQ ID NO: 155) + | SEQ ID NO: 158 |
| | | | SEQ ID NO: 64 | |
| CD19-CD28H/TM-ZAP70²⁵⁵⁻⁶⁰⁰ | SEQ ID NO: 152 | SEQ ID NO: 55 | SEQ ID NO: 64 | SEQ ID NO: 159 |
| CD19-CD28H/TM-PLCG1 | SEQ ID NO: 152 | SEQ ID NO: 55 | SEQ ID NO: 65 | SEQ ID NO: 160 |
| GD2-8h/tm-ZAP70 (255-600) | SEQ ID NO: 205 | SEQ ID NO: 56 | SEQ ID NO: 64 | SEQ ID NO: 206 |
| B7-H3-28h/tm-ZAP70 (255-600 V314A) | SEQ ID NO: 53 | SEQ ID NO: 55 | SEQ ID NO: 207 | SEQ ID NO: 208 |
| B7-H3-28h/tm-ZAP70 (255-600 D327P) | SEQ ID NO: 53 | SEQ ID NO: 55 | SEQ ID NO: 209 | SEQ ID NO: 210 |
| B7-H3-28h/tm-ZAP70 (255-600 R360P) | SEQ ID NO: 53 | SEQ ID NO: 55 | SEQ ID NO: 211 | SEQ ID NO: 212 |
| B7-H3-28h/tm-ZAP70 (255-600 K362E) | SEQ ID NO: 53 | SEQ ID NO: 55 | SEQ ID NO: 213 | SEQ ID NO: 214 |
| B7-H3-28h/tm-4-1BB-ZAP70 (255-600 | SEQ ID NO: 53 | SEQ ID NO: 55 | (SEQ ID NO: 154) + | SEQ ID NO: 215 |
| Y292F) | | | SEQ ID NO: 129 | |
| CD19-28h/tm-ZAP70 (255-600 Y292F) | SEQ ID NO: 152 | SEQ ID NO: 55 | SEQ ID NO: 129 | SEQ ID NO: 216 |
| CD19-28h/tm-CD28-ZAP70 (255-600) | SEQ ID NO: 152 | SEQ ID NO: 55 | (SEQ ID NO: 155) + | SEQ ID NO: 217 |
| | | | SEQ ID NO: 64 | |
| CD19-28h/tm-4-1BB-ZAP70 (255-600) | SEQ ID NO: 152 | SEQ ID NO: 55 | (SEQ ID NO: 154) + | SEQ ID NO: 218 |
| | | | SEQ ID NO: 64 | |
| CD19-28h/tm-CD28-ZAP70 (255-600 | SEQ ID NO: 152 | SEQ ID NO: 55 | (SEQ ID NO: 155) + | SEQ ID NO: 219 |
| Y292F) | | | SEQ ID NO: 129 | |
| CD19-28h/tm-4-1BB-ZAP70 (255-600 | SEQ ID NO: 152 | SEQ ID NO: 55 | (SEQ ID NO: 154) + | SEQ ID NO: 220 |
| Y292F) | | | SEQ ID NO: 129 | |
| B7-H3-28h/tm-ZAP70 (280-600) | SEQ ID NO: 53 | SEQ ID NO: 55 | SEQ ID NO: 221 | SEQ ID NO: 222 |
| B7-H3-28h/tm-ZAP70 (308-600) | SEQ ID NO: 53 | SEQ ID NO: 55 | SEQ ID NO: 223 | SEQ ID NO: 224 |
| B7-H3-28h/tm-LAT | SEQ ID NO: 53 | SEQ ID NO: 55 | SEQ ID NO: 62 | SEQ ID NO: 225 |
| B7-H3-8h/tm-SLP-76 | SEQ ID NO: 53 | SEQ ID NO: 56 | SEQ ID NO: 60 | SEQ ID NO: 226 |
| GD2-28h/tm-LAT | SEQ ID NO: 205 | SEQ ID NO: 55 | SEQ ID NO: 62 | SEQ ID NO: 227 |
| GD2-8h/tm-SLP-76 | SEQ ID NO: 205 | SEQ ID NO: 56 | SEQ ID NO: 60 | SEQ ID NO: 228 |
| CD19-28h/tm-LAT (28-90del, 200-262del) | SEQ ID NO: 51 | SEQ ID NO: 55 | SEQ ID NO: 229 | SEQ ID NO: 230 |
| CD19-28h/tm(2CA)-LAT (28-90del, 200- | SEQ ID NO: 51 | SEQ ID NO: 124 | SEQ ID NO: 229 | SEQ ID NO: 231 |
| 262del) | | | | |
| CD19-28h/tm-LAT (28-130del, 200-262del) | SEQ ID NO: 51 | SEQ ID NO: 55 | SEQ ID NO: 232 | SEQ ID NO: 233 |
| CD19-28h/tm(2CA)-LAT (28-130del, 200- | SEQ ID NO: 51 | SEQ ID NO: 124 | SEQ ID NO: 232 | SEQ ID NO: 234 |
| 262del) | | | | |
| HER2-8h/tm-SLP-76 (1-81del, 224-244del) | SEQ ID NO: 50 | SEQ ID NO: 56 | SEQ ID NO: 235 | SEQ ID NO: 236 |
| HER2-8h/tm-SLP-76 (224-265del) | SEQ ID NO: 50 | SEQ ID NO: 56 | SEQ ID NO: 237 | SEQ ID NO: 238 |
| HER2-8h/tm-SLP-76 (1-81del, 224- | SEQ ID NO: 50 | SEQ ID NO: 56 | SEQ ID NO: 239 | SEQ ID NO: 240 |
| 300del)) | | | | |
| ROR1-28h/tm-LAT | SEQ ID NO: 241 | SEQ ID NO: 55 | SEQ ID NO: 62 | SEQ ID NO: 242 |
| ROR1-28h/tm(2CA)-LAT | SEQ ID NO: 241 | SEQ ID NO: 124 | SEQ ID NO: 62 | SEQ ID NO: 243 |
| ROR1-28h/tm-LAT (200-262del) | SEQ ID NO: 241 | SEQ ID NO: 55 | SEQ ID NO: 126 | SEQ ID NO: 244 |
| ROR1-28h/tm(2CA)-LAT (200-262del) | SEQ ID NO: 241 | SEQ ID NO: 124 | SEQ ID NO: 126 | SEQ ID NO: 245 |
| CD19-8h/tm-SLP-76 (224-244del) | SEQ ID NO: 51 | SEQ ID NO: 56 | SEQ ID NO: 128 | SEQ ID NO: 246 |
| ROR1-8h/tm-SLP-76 | SEQ ID NO: 241 | SEQ ID NO: 56 | SEQ ID NO: 60 | SEQ ID NO: 247 |
| ROR1-8h/tm-SLP-76 (224-244del) | SEQ ID NO: 241 | SEQ ID NO: 56 | SEQ ID NO: 128 | SEQ ID NO: 248 |

### REFERENCES

[0336] 1. Majzner R G, Mackall C L. Clinical lessons learned from the first leg of the CAR T cell journey. Nat Med. 2019; 25(9):1341-55. Epub 2019/09/11. doi: 10.1038/s41591-019-0564-6. PubMed PMID: 31501612.
[0337] 2. Lamers C H, Sleijfer S, van Steenbergen S, van Elzakker P, van Krimpen B, Groot C, Vulto A, den Bakker M, Oosterwijk E, Debets R, Gratama J W. Treatment of metastatic renal cell carcinoma with CAIX CAR-engineered T cells: clinical evaluation and management of on-target toxicity. Mol Ther. 2013; 21(4):904-12. Epub 2013/02/21. doi: 10.1038/mt.2013.17. PubMed PMID: 23423337; PMCID: PMC5189272.
[0338] 3. Srivastava S, Salter A I, Liggitt D, Yechan-Gunja S, Sarvothama M, Cooper K, Smythe K S, Dudakov J A, Pierce R H, Rader C, Riddell S R. Logic-Gated ROR1 Chimeric Antigen Receptor Expression Rescues T Cell-Mediated Toxicity to Normal Tissues and Enables Selective Tumor Targeting. Cancer Cell. 2019; 35(3):489-503 e8. Epub 2019/03/20. doi: 10.1016/j.ccell.2019.02.003. PubMed PMID: 30889382; PMCID: PMC6450658.
[0339] 4. Smith J B, Lanitis E, Dangaj D, Buza E, Poussin M, Stashwick C, Scholler N, Powell D J, Jr. Tumor Regression and Delayed Onset Toxicity Following B7-H4 CAR T Cell Therapy. Mol Ther. 2016; 24(11):1987-99. Epub 2016/07/22. doi: 10.1038/mt.2016.149. PubMed PMID: 27439899; PMCID: PMC5154474.
[0340] 5. Gross G, Waks T, Eshhar Z. Expression of immunoglobulin-T-cell receptor chimeric molecules as functional receptors with antibody-type specificity. Proc Natl Acad Sci U S A. 1989; 86(24):10024-8. Epub 1989/12/01. doi: 10.1073/pnas.86.24.10024. PubMed PMID: 2513569; PMCID: PMC298636.
[0341] 6. Irving B A, Weiss A. The cytoplasmic domain of the T cell receptor zeta chain is sufficient to couple to receptor-associated signal transduction pathways. Cell. 1991; 64(5):891-901. Epub 1991/03/08. doi: 10.1016/0092-8674(91)90314-o. PubMed PMID: 1705867.
[0342] 7. Letourneur F, Klausner R D. Activation of T cells by a tyrosine kinase activation domain in the cytoplasmic tail of CD3 epsilon. Science. 1992; 255(5040):79-82. Epub 1992/01/03. doi: 10.1126/science.1532456. PubMed PMID: 1532456.
[0343] 8. Kloss C C, Condomines M, Cartellieri M, Bachmann M, Sadelain M. Combinatorial antigen recognition with balanced signaling promotes selective tumor eradication by engineered T cells. Nat Biotechnol. 2013; 31(1):71-5. Epub 2012/12/18. doi: 10.1038/nbt.2459. PubMed PMID: 23242161; PMCID: PMC5505184.
[0344] 9. Roybal K T, Rupp L J, Morsut L, Walker W J, McNally K A, Park J S, Lim W A. Precision Tumor Recognition by T Cells With Combinatorial Antigen-Sensing Circuits. Cell. 2016; 164(4):770-9. Epub 2016/02/03. doi: 10.1016/j.cell.2016.01.011. PubMed PMID: 26830879; PMCID: PMC4752902.
[0345] 10. Majzner R G, Rietberg S P, Sotillo E, Dong R, Vachharajani V T, Labanieh L, Myklebust J H, Kadapakkam M, Weber E W, Tousley A M, Richards R M, Heitzeneder S, Nguyen S M, Wiebking V, Theruvath J, Lynn R C, Xu P, Dunn A R, Vale R D, Mackall C L. Tuning the Antigen Density Requirement for CAR T-cell Activity. Cancer Discov. 2020; 10(5):702-23. Epub 2020/03/21. doi: 10.1158/2159-8290.CD-19-0945. PubMed PMID: 32193224.
[0346] 11. Lo W L, Shah N H, Rubin S A, Zhang W, Horkova V, Fallahee I R, Stepanek O, Zon L I, Kuriyan J, Weiss A. Slow phosphorylation of a tyrosine residue in LAT optimizes T cell ligand discrimination. Nat Immunol. 2019; 20(11):1481-93. Epub 2019/10/16. doi: 10.1038/s41590-019-0502-2. PubMed PMID: 31611699; PMCID: PMC6858552.
[0347] 12. Wang X, Li J P, Chiu L L, Lan J L, Chen D Y, Boomer J, Tan T H. Attenuation of T cell receptor signaling by serine phosphorylation-mediated lysine 30 ubiquitination of SLP-76 protein. J Biol Chem. 2012; 287(41):34091-100. Epub 2012/08/21. doi: 10.1074/jbc.M112.371062. PubMed PMID: 22902619; PMCID: PMC3464518.
[0348] 13. Currier N V, Ackerman S E, Kintzing J R, Chen R, Filsinger Interrante M, Steiner A, Sato A K, Cochran J R. Targeted Drug Delivery with an Integrin-Binding Knottin-Fc-MMAF Conjugate Produced by Cell-Free Protein Synthesis. Mol Cancer Ther. 2016; 15(6):1291-300. Epub 2016/05/20. doi: 10.1158/1535-7163.MCT-15-0881. PubMed PMID: 27197305.
[0349] 14. Majzner R G, Theruvath J L, Nellan A, Heitzeneder S, Cui Y, Mount C W, Rietberg S P, Linde M H, Xu P, Rota C, Sotillo E, Labanieh L, Lee D W, Orentas R J, Dimitrov D S, Zhu Z, Croix B S, Delaidelli A, Sekunova A, Bonvini E, Mitra S S, Quezado M M, Majeti R, Monje M, Sorensen P H B, Maris J M, Mackall C L. CAR T Cells Targeting B7-H3, a Pan-Cancer Antigen, Demonstrate Potent Preclinical Activity Against Pediatric Solid Tumors and Brain Tumors. Clin Cancer Res. 2019. Epub 2019 Jan. 19. doi: 10.1158/1078-0432.CCR-18-0432. PubMed PMID: 30655315.
[0350] 15. Travaglini K J, Nabhan A N, Penland L, Sinha R, Gillich A, Sit R V, Chang S, Conley S D, Mori Y, Seita J, Berry G J, Shrager J B, Metzger R J, Kuo C S, Neff N, Weissman I L, Quake S R, Krasnow M A. A molecular cell atlas of the human lung from single cell RNA sequencing. bioRxiv. 2020:742320. doi: 10.1101/742320.
[0351] 16. Fedorov V D, Themeli M, Sadelain M. PD-1- and CTLA-4-based inhibitory chimeric antigen receptors (iCARs) divert off-target immunotherapy responses. Sci Transl Med. 2013; 5(215):215ra172. Epub 2013/12/18. doi: 10.1126/scitranslmed.3006597. PubMed PMID: 24337479; PMCID: PMC4238416.
[0352] 17. Feucht J, Sun J, Eyquem J, Ho Y J, Zhao Z, Leibold J, Dobrin A, Cabriolu A, Hamieh M, Sadelain M. Calibration of CAR activation potential directs alternative T cell fates and therapeutic potency. Nat Med. 2019; 25(1):82-8. Epub 2018/12/19. doi: 10.1038/s41591-018-0290-5. PubMed PMID: 30559421; PMCID: PMC6532069.
[0353] 18. Schultz L M, Muffly L S, Spiegel J Y, Ramakrishna S, Hossain N, Baggott C, Sahaf B, Patel S, Craig J, Yoon J, Kadapakkam M, Majzner R G, Frank M J, Erickson C, Marcy A C, Fujimoto M, Bhatia N, Meyer E H, Kong K A, Egeler E, Mavroukakis S, Qin H, Fry T J, Feldman S A, Miklos D B, Mackall C L, Davis K L. Phase I Trial Using CD19/CD22 Bispecific CAR T Cells in Pediatric and Adult Acute Lymphoblastic Leukemia (ALL). Blood. 2019; 134(Supplement_1):744-. doi: 10.1182/blood-2019-129411.

The application's sequence listing, which the Patent Office published only in electronic form, follows.

SEQUENCE LISTING (248 sequences)

SEQ ID NO: 1 - protein, 264 aa, Artificial sequence
  Synthetic polypeptide
MARSVTLVFLVLVSLTGLYAADIQMTQSPSSLSASVGDRVTITCRASQDVNTAVAWYQQKPGKAPKLLIYSASFLESGVPSRFSGSRSGTDFTLTISSLQPEDFATYYCQQHYTTPPTFGQGTKVEIKGSTSGSGKPGSGEGSGEVQLVESGGGLVQPGGSLRLSCAASGFNIKDTYIHWVRQAPGKGLEWVARIYPTNGYTRYADSVKGRFTISADTSKNTAYLQMNSLRAEDTAVYYCSRWGGDGFYAMDVWGQGTLVTVSS

SEQ ID NO: 2 - protein, 267 aa, Artificial sequence
  Synthetic polypeptide
MLLLVTSLLLCELPHPAFLLIPDIQMTQTTSSLSASLGDRVTISCRASQDISKYLNWYQQKPDGTVKLLIYHTSRLHSGVPSRFSGSGSGTDYSLTISNLEQEDIATYFCQQGNTLPYTFGGGTKLEITGSTSGSGKPGSGEGSTKGEVKLQESGPGLVAPSQSLSVTCTVSGVSLPDYGVSWIRQPPRKGLEWLGVIWGSETTYYNSALKSRLTIIKDNSKSQVFLKMNSLQTDDTAIYYCAKHYYYGGSYAMDYWGQGTSVTVSS

SEQ ID NO: 3 - protein, 262 aa, Artificial sequence
  Synthetic polypeptide
MEFGLSWLFLVAILKGVQCSRDILLTQTPLSLPVSLGDQASISCRSSQSLVHRNGNTYLHWYLQKPGQSPKLLIHKVSNRFSGVPDRFSGSGSGTDFTLKISRVEAEDLGVYFCSQSTHVPPLTFGAGTKLELKGGGGSGGGGSGGGGSEVKLQQSGPSLVEPGASVMISCKASGSSFTGYNMNWVRQNIGKSLEWIGAIDPYYGGTSYNQKFKGRATLTVDKSSSTAYMHLKSLTSEDSAVYYCVSGMKYWGQGTSVTVSS

SEQ ID NO: 4 - protein, 270 aa, Artificial sequence
  Synthetic polypeptide
MVATLLVTSLLLCELPHPAFLLIPDTEVQLVESGGGLVQPGGSLRLSCAASGFTFSSFGMHWVRQAPGKGLEWVAYISSDSSAIYYADTVKGRFTISRDNAKNSLYLQMNSLRDEDTAVYYCGRGRENIYYGSRLDYWGQGTTVTVSSGGGGSGGGGSGGGGSDIQLTQSPSFLSASVGDRVTITCKASQNVDTNVAWYQQKPGKAPKALIYSASYRYSGVPSRFSGSGSGTDFTLTISSLQPEDFATYYCQQYNNYPFTFGQGTKLEIK

SEQ ID NO: 5 - protein, 258 aa, Artificial sequence
  Synthetic polypeptide
MLLLVTSLLLCELPHPAFLLIPQVQLQQSGPGLVKPSQTLSLTCAISGDSVSSNSAAWNWIRQSPSRGLEWLGRTYYRSKWYNDYAVSVKSRITINPDTSKNQFSLQLNSVTPEDTAVYYCAREVTGDLEDAFDIWGQGTMVTVSSGGGGSDIQMTQSPSSLSASVGDRVTITCRASQTIWSYLNWYQQRPGKAPNLLIYAASSLQSGVPSRFSGRGSGTDFTLTISSLQAEDFATYYCQQSYSIPQTFGQGTKLEIK

SEQ ID NO: 6 - protein, 69 aa, Artificial sequence
  Synthetic polypeptide
AAAIEVMYPPPYLDNEKSNGTIIHVKGKHLCPSPLFPGPSKPFWVLVVVGGVLACYSLLVTVAFIIFWV

SEQ ID NO: 7 - protein, 73 aa, Artificial sequence
  Synthetic polypeptide
AAATTTPAPRPPTPAPTIASQPLSLRPEACRPAAGGAVHTRGLDFACDIYIWAPLAGTCGVLLLSLVITLYCK

SEQ ID NO: 8 - protein, 37 aa, Artificial sequence
  Synthetic polypeptide
AAAESKYGPPCPPCPMALIVLGGVAGLLLFIGLGIFF

SEQ ID NO: 9 - protein, 66 aa, Artificial sequence
  Synthetic polypeptide
AAAAMDTGLYICKVELMYPPPYYLGIGNGTQIYVIDPEPCPDSDMALIVLGGVAGLLLFIGLGIFF

SEQ ID NO: 10 - protein, 321 aa, Artificial sequence
  Synthetic polypeptide
AKTTPPSVYGRVTVSSAEPKSCDKTHTCPPCPAPPVAGPSVFLFPPKPKDTLMISRTPEVTCVVVDVSHEDPEVKFNWYVDGVEVHNAKTKPREEQYQSTYRVVSVLTVLHQDWLNGKEYKCKVSNKALPAPIEKTISKAKGQPREPQVYTLPPSRDELTKNQVSLTCLVKGFYPSDIAVEWESNGQPENNYKTTPPVLDSDGSFFLYSKLTVDKSRWQQGNVFSCSVMHEALHNHYTQKSLSLSPGKKDPKAAAIEVMYPPPYLDNEKSNGTIIHVKGKHLCPSPLFPGPSKPFWVLVVVGGVLACYSLLVTVAFIIFWV

SEQ ID NO: 11 - protein, 542 aa, Artificial sequence
  Synthetic polypeptide
GSGGGGSALRNVPFRSEVLGWDPDSLADYFKKLNYKDCEKAVKKYHIDGARFLNLTENDIQKFPKLRVPILSKLSQEINKNEERRSIFTRKPQVPRFPEETESHEEDNGGWSSFEEDDYESPNDDQDGEDDGDYESPNEEEEAPVEDDADYEPPPSNDEEALQNSILPAKPFPNSNSMYIDRPPSGKTPQQPPVPPQRPMAALPPPPAGRNHSPLPPPQTNHEEPSRSRNHKTAKLPAPSIDRSTKPPLDRSLAPFDREPFTLGKKPPFSDKPSIPAGRSLGEHLPKIQKPPLPPTTERHERSSPLPGKKPPVPKHGWGPDRRENDEDDVHQRPLPQPALLPMSSNTFPSRSTKPSPMNPLPSSHMPGAFSESNSSFPQSASLPPYFSQGPSNRPPIRAEGRNFPLPLPNKPRPPSPAEEENSLNEEWYVSYITRPEAEAALRKINQDGTFLVRDSSKKTTTNPYVLMVLYKDKVYNIQIRYQKESQVYLLGTGLRGKEDFLSVSDIIDYFRKMPLLLIDGKNRGSRYQCTLTHAAGYPGNS

SEQ ID NO: 12 - protein, 546 aa, Artificial sequence
  Synthetic polypeptide
GSGGGGSGCVQCKDKEATKLTEERDGSLNQSSGYRYGTDPTPQHYPSFGVTSIPNYNNFHAAGGQGLTVFGGVNSSSHTGTLRTRGGTGVTLFVALYDYEARTEDDLSFHKGEKFQILNSSEGDWWEARSLTTGETGYIPSNYVAPVDSIQAEEWYFGKLGRKDAERQLLSFGNPRGTFLIRESETTKGAYSLSIRDWDDMKGDHVKHYKIRKLDNGGYYITTRAQFETLQQLVQHYSERAAGLCCRLVVPCHKGMPRLTDLSVKTKDVWEIPRESLQLIKRLGNGQFGEVWMGTWNGNTKVAIKTLKPGTMSPESFLEEAQIMKKLKHDKLVQLYAVVSEEPIYIVTEYMNKGSLLDFLKDGEGRALKLPNLVDMAAQVAAGMAYIERMNYIHRDLRSANILVGNGLICKIADFGLARLIEDNEYTARQGAKFPIKWTAPEAALYGRFTIKSDVWSFGILLTELVTKGRVPYPGMNNREVLEQVERGYRMPCPQDCPISLHELMIHCWKKDPEERPTFEYLQSFLEDYFTATEPQYQPGENLGNS

SEQ ID NO: 13 - protein, 240 aa, Artificial sequence
  Synthetic polypeptide
GSHCHRLPGSYDSTSSDSLYPRGIQFKRPHTVAPWPPAYPPVTSYPPLSQPDLLPIPRSPQPLGGSHRTPSSRRDSDGANSVASYENEGASGIRGAQAGWGVWGPSWTRLTPVSLPPEPACEDADEDEDDYHNPGYLVVLPDSTPATSTAAPSAPALSTPGIRDSAFSMESIDDYVNVPESGESAEASLDGSREYVNVSQELHPGAAKTEPAALSSQEAEEVEEEGAPDYENLQELNGNS

SEQ ID NO: 14 - protein, 477 aa, Artificial sequence
  Synthetic polypeptide
GSIRNGSEVRDPLVTYEGSNPPASPLQDNLVIALHSYEPSHDGDLGFEKGEQLRILEQSGEWWKAQSLTTGQEGFIPFNFVAKANSLEPEPWFFKNLSRKDAERQLLAPGNTHGSFLIRESESTAGSFSLSVRDFDQNQGEVVKHYKIRNLDNGGFYISPRITFPGLHELVRHYTNASDGLCTRLSRPCQTQKPQKPWWEDEWEVPRETLKLVERLGAGQFGEVWMGYYNGHTKVAVKSLKQGSMSPDAFLAEANLMKQLQHQRLVRLYAVVTQEPIYIITEYMENGSLVDFLKTPSGIKLTINKLLDMAAQIAEGMAFIEERNYIHRDLRAANILVSDTLSCKIADFGLARLIEDNEYTAREGAKFPIKWTAPEAINYGTFTIKSDVWSFGILLTEIVTHGRIPYPGMTNPEVIQNLERGYRMVRPDNCPEELYQLMRLCWKERPEDRPTFDYLRSVLEDFFTATEGQYQPQPGNS

SEQ ID NO: 15 - protein, 351 aa, Artificial sequence
  Synthetic polypeptide
GSPNSSASNASGAAAPTLPAHPSTLTHPQRRIDTLNSDGYTPEPARITSPDKPRPMPMDTSVYESPYSDPEELKDKKLFLKRDNLLIADIELGCGNFGSVRQGVYRMRKKQIDVAIKVLKQGTEKADTEEMMREAQIMHQLDNPYIVRLIGVCQAEALMLVMEMAGGGPLHKFLVGKREEIPVSNVAELLHQVSMGMKYLEEKNFVHRDLAARNVLLVNRHYAKISDFGLSKALGADDSYYTARSAGKWPLKWYAPECINFRKFSSRSDVWSYGVTMWEALSYGQKPYKKMKGPEVMAFIEQGKRMECPPECPPELYALMSDCWIYKWEDRPDFLTVEQRMRACYYSLGNS

SEQ ID NO: 16 - protein, 1294 aa, Artificial sequence
  Synthetic polypeptide
GGGGSAGAASPCANGCGPGAPSDAEVLHLCRSLEVGTVMTLFYSKKSQRPERKTFQVKLETRQITWSRGADKIEGAIDIREIKEIRPGKTSRDFDRYQEDPAFRPDQSHCFVILYGMEFRLKTLSLQATSEDEVNMWIKGLTWLMEDTLQAPTPLQIERWLRKQFYSVDRNREDRISAKDLKNMLSQVNYRVPNMRFLRERLTDLEQRSGDITYGQFAQLYRSLMYSAQKTMDLPFLEASTLRAGERPELCRVSLPEFQQFLLDYQGELWAVDRLQVQEFMLSFLRDPLREIEEPYFFLDEFVTFLFSKENSVWNSQLDAVCPDTMNNPLSHYWISSSHNTYLTGDQFSSESSLEAYARCLRMGCRCIELDCWDGPDGMPVIYHGHTLTTKIKFSDVLHTIKEHAFVASEYPVILSIEDHCSIAQQRNMAQYFKKVLGDTLLTKPVEISADGLPSPNQLKRKILIKHKKLAEGSAYEEVPTSMMYSENDISNSIKNGILYLEDPVNHEWYPHYFVLTSSKIYYSEETSSDQGNEDEEEPKEVSSSTELHSNEKWFHGKLGAGRDGRHIAERLLTEYCIETGAPDGSFLVRESETFVGDYTLSFWRNGKVQHCRIHSRQDAGTPKFFLTDNLVFDSLYDLITHYQQVPLRCNEFEMRLSEPVPQTNAHESKEWYHASLTRAQAEHMLMRVPRDGAFLVRKRNEPNSYAISFRAEGKIKHCRVQQEGQTVMLGNSEFDSLVDLISYYEKHPLYRKMKLRYPINEEALEKIGTAEPDYGALYEGRNPGFYVEANPMPTFKCAVKALFDYKAQREDELTFIKSAIIQNVEKQEGGWWRGDYGGKKQLWFPSNYVEEMVNPVALEPEREHLDENSPLGDLLRGVLDVPACQIAIRPEGKNNRLFVFSISMASVAHWSLDVAADSQEELQDWVKKIREVAQTADARLTEGKIMERRKKIALELSELVVYCRPVPFDEEKIGTERACYRDMSSFPETKAEKYVNKAKGKKFLQYNRLQLSRIYPKGQRLDSSNYDPLPMWICGSQLVALNFQTPDKPMQMNQALFMTGRHCGYVLQPSTMRDEAFDPFDKSSLRGLEPCAISIEVLGARHLPKNGRGIVCPFVEIEVAGAEYDSTKQKTEFVVDNGLNPVWPAKPFHFQISNPEFAFLRFVVYEEDMFSDQNFLAQATFPVKGLKTGYRAVPLKNNYSEDLELASLLIKIDIFPAKENGDLSPFSGTSLRERGSDASGQLFHGRAREGSFESRYQQPFEDFRISQEHLADHFDSRERRAPRRTRVNGDNRL

SEQ ID NO: 17 - protein, 240 aa, Artificial sequence
  Synthetic polypeptide
GSHCHRLPGSYDSTSSDSLYPRGIQFKRPHTVAPWPPAYPPVTSYPPLSQPDLLPIPRSPQPLGGSHRTPSSRRDSDGANSVASYENEGASGIRGAQAGWGVWGPSWTRLTPVSLPPEPACEDADEDEDDYHNPGFLVVLPDSTPATSTAAPSAPALSTPGIRDSAFSMESIDDYVNVPESGESAEASLDGSREYVNVSQELHPGAAKTEPAALSSQEAEEVEEEGAPDYENLQELNGNS

SEQ ID NO: 18 - protein, 240 aa, Artificial sequence
  Synthetic polypeptide
GSHCHRLPGSYDSTSSDSLYPRGIQFKRPHTVAPWPPAYPPVTSYPPLSQPDLLPIPRSPQPLGGSHRTPSSRRDSDGANSVASYENEGASGIRGAQAGWGVWGPSWTRLTPVSLPPEPACEDADEDEDDYHNPGYLVVLPDSTPATSTAAPSAPALSTPGIRDSAFSMESIDDFVNVPESGESAEASLDGSREYVNVSQELHPGAAKTEPAALSSQEAEEVEEEGAPDYENLQELNGNS

SEQ ID NO: 19 - protein, 240 aa, Artificial sequence
  Synthetic polypeptide
GSHCHRLPGSYDSTSSDSLYPRGIQFKRPHTVAPWPPAYPPVTSYPPLSQPDLLPIPRSPQPLGGSHRTPSSRRDSDGANSVASYENEGASGIRGAQAGWGVWGPSWTRLTPVSLPPEPACEDADEDEDDYHNPDYLVVLPDSTPATSTAAPSAPALSTPGIRDSAFSMESIDDYVNVPESGESAEASLDGSREYVNVSQELHPGAAKTEPAALSSQEAEEVEEEGAPDYENLQELNGNS

SEQ ID NO: 20 - protein, 542 aa, Artificial sequence
  Synthetic polypeptide
GSGGGGSALRNVPFRSEVLGWDPDSLADYFKKLNYRDCEKAVKKYHIDGARFLNLTENDIQKFPKLRVPILSKLSQEINKNEERRSIFTRKPQVPRFPEETESHEEDNGGWSSFEEDDYESPNDDQDGEDDGDYESPNEEEEAPVEDDADYEPPPSNDEEALQNSILPAKPFPNSNSMYIDRPPSGKTPQQPPVPPQRPMAALPPPPAGRNHSPLPPPQTNHEEPSRSRNHKTAKLPAPSIDRSTKPPLDRSLAPFDREPFTLGKKPPFSDKPSIPAGRSLGEHLPKIQKPPLPPTTERHERSSPLPGKKPPVPKHGWGPDRRENDEDDVHQRPLPQPALLPMSSNTFPSRSTKPSPMNPLPSSHMPGAFSESNSSFPQSASLPPYFSQGPSNRPPIRAEGRNFPLPLPNKPRPPSPAEEENSLNEEWYVSYITRPEAEAALRKINQDGTFLVRDSSKKTTTNPYVLMVLYKDKVYNIQIRYQKESQVYLLGTGLRGKEDFLSVSDIIDYFRKMPLLLIDGKNRGSRYQCTLTHAAGYPGNS

SEQ ID NO: 21 - protein, 95 aa, Artificial sequence
  Synthetic polypeptide
GSKKLVKKFRQKKQRQWIGPTGMNQNMSFHRNHTATVRSHAENPTASHVDNEYSQPPRNSHLSAYPALEGALHRSSMQPDNSSDSDYDLHGAQRL

SEQ ID NO: 22 - protein, 247 aa, Artificial sequence
  Synthetic polypeptide
GSLRIKGKYALPVMVNHQHLPTTIPAGSNSYQPVPITIPKEVFMLPIQVQAPPPEDSDSGSDSDYEHYDFSAQPPVALTTFYNSQRHRVTDEEVQQSRFQMPPLEEGLEELHASHIPTANPGHCITDPPSLGPQYHPRSNSESSTSSGEDYCNSPKSKLPPWNPQVFSSERSSFLEQPPNLELAGTQPAFSAGPPADDSSSTSSGEWYQNFQPPPQPPSEEQFGCPGSPSPQPDSTDNDDYDDISAA

SEQ ID NO: 23 - protein, 63 aa, Artificial sequence
  Synthetic polypeptide
GSRKELKRKKKWDLEISLDSGHEKKVISSLQEDRHLEEELKCQEQKEEQLQEGVHRKEPQGAT

SEQ ID NO: 24 - protein, 44 aa, Artificial sequence
  Synthetic polypeptide
GSKRGRKKLLYIFKQPFMRPVQTTQEEDGCSCRFPEEEEGGCEL

SEQ ID NO: 25 - protein, 41 aa, Artificial sequence
  Synthetic polypeptide
RSKRSRLLHSDYMNMTPRRPGPTRKHYQPYAPPRDFAAYRS

SEQ ID NO: 26 - protein, 116 aa, Artificial sequence
  Synthetic polypeptide
KRKKQRSRRNDEELETRAHRVATEERGRKPHQIPASTPQNPATSQHPPPPPGHRSQAPSHRPPPPGHRVQHQPQKRPPAPSGTQVHQQKGPPLPRPRVQPKPPHGAAENSLSPSSN

SEQ ID NO: 27 - protein, 875 aa, Artificial sequence
  Synthetic polypeptide
MARSVTLVFLVLVSLTGLYAADIQMTQSPSSLSASVGDRVTITCRASQDVNTAVAWYQQKPGKAPKLLIYSASFLESGVPSRFSGSRSGTDFTLTISSLQPEDFATYYCQQHYTTPPTFGQGTKVEIKGSTSGSGKPGSGEGSGEVQLVESGGGLVQPGGSLRLSCAASGFNIKDTYIHWVRQAPGKGLEWVARIYPTNGYTRYADSVKGRFTISADTSKNTAYLQMNSLRAEDTAVYYCSRWGGDGFYAMDVWGQGTLVTVSSAAAIEVMYPPPYLDNEKSNGTIIHVKGKHLCPSPLFPGPSKPFWVLVVVGGVLACYSLLVTVAFIIFWVGSGGGGSALRNVPFRSEVLGWDPDSLADYFKKLNYKDCEKAVKKYHIDGARFLNLTENDIQKFPKLRVPILSKLSQEINKNEERRSIFTRKPQVPRFPEETESHEEDNGGWSSFEEDDYESPNDDQDGEDDGDYESPNEEEEAPVEDDADYEPPPSNDEEALQNSILPAKPFPNSNSMYIDRPPSGKTPQQPPVPPQRPMAALPPPPAGRNHSPLPPPQTNHEEPSRSRNHKTAKLPAPSIDRSTKPPLDRSLAPFDREPFTLGKKPPFSDKPSIPAGRSLGEHLPKIQKPPLPPTTERHERSSPLPGKKPPVPKHGWGPDRRENDEDDVHQRPLPQPALLPMSSNTFPSRSTKPSPMNPLPSSHMPGAFSESNSSFPQSASLPPYFSQGPSNRPPIRAEGRNFPLPLPNKPRPPSPAEEENSLNEEWYVSYITRPEAEAALRKINQDGTFLVRDSSKKTTTNPYVLMVLYKDKVYNIQIRYQKESQVYLLGTGLRGKEDFLSVSDIIDYFRKMPLLLIDGKNRGSRYQCTLTHAAGYPGNS

SEQ ID NO: 28 - protein, 879 aa, Artificial sequence
  Synthetic polypeptide
MARSVTLVFLVLVSLTGLYAADIQMTQSPSSLSASVGDRVTITCRASQDVNTAVAWYQQKPGKAPKLLIYSASFLESGVPSRFSGSRSGTDFTLTISSLQPEDFATYYCQQHYTTPPTFGQGTKVEIKGSTSGSGKPGSGEGSGEVQLVESGGGLVQPGGSLRLSCAASGFNIKDTYIHWVRQAPGKGLEWVARIYPTNGYTRYADSVKGRFTISADTSKNTAYLQMNSLRAEDTAVYYCSRWGGDGFYAMDVWGQGTLVTVSSAAAIEVMYPPPYLDNEKSNGTIIHVKGKHLCPSPLFPGPSKPFWVLVVVGGVLACYSLLVTVAFIIFWVGSGGGGSGCVQCKDKEATKLTEERDGSLNQSSGYRYGTDPTPQHYPSFGVTSIPNYNNFHAAGGQGLTVFGGVNSSSHTGTLRTRGGTGVTLFVALYDYEARTEDDLSFHKGEKFQILNSSEGDWWEARSLTTGETGYIPSNYVAPVDSIQAEEWYFGKLGRKDAERQLLSFGNPRGTFLIRESETTKGAYSLSIRDWDDMKGDHVKHYKIRKLDNGGYYITTRAQFETLQQLVQHYSERAAGLCCRLVVPCHKGMPRLTDLSVKTKDVWEIPRESLQLIKRLGNGQFGEVWMGTWNGNTKVAIKTLKPGTMSPESFLEEAQIMKKLKHDKLVQLYAVVSEEPIYIVTEYMNKGSLLDFLKDGEGRALKLPNLVDMAAQVAAGMAYIERMNYIHRDLRSANILVGNGLICKIADFGLARLIEDNEYTARQGAKFPIKWTAPEAALYGRFTIKSDVWSFGILLTELVTKGRVPYPGMNNREVLEQVERGYRMPCPQDCPISLHELMIHCWKKDPEERPTFEYLQSFLEDYFTATEPQYQPGENLGNS

SEQ ID NO: 29 - protein, 576 aa, Artificial sequence
  Synthetic polypeptide
MLLLVTSLLLCELPHPAFLLIPDIQMTQTTSSLSASLGDRVTISCRASQDISKYLNWYQQKPDGTVKLLIYHTSRLHSGVPSRFSGSGSGTDYSLTISNLEQEDIATYFCQQGNTLPYTFGGGTKLEITGSTSGSGKPGSGEGSTKGEVKLQESGPGLVAPSQSLSVTCTVSGVSLPDYGVSWIRQPPRKGLEWLGVIWGSETTYYNSALKSRLTIIKDNSKSQVFLKMNSLQTDDTAIYYCAKHYYYGGSYAMDYWGQGTSVTVSSAAAIEVMYPPPYLDNEKSNGTIIHVKGKHLCPSPLFPGPSKPFWVLVVVGGVLACYSLLVTVAFIIFWVGSHCHRLPGSYDSTSSDSLYPRGIQFKRPHTVAPWPPAYPPVTSYPPLSQPDLLPIPRSPQPLGGSHRTPSSRRDSDGANSVASYENEGASGIRGAQAGWGVWGPSWTRLTPVSLPPEPACEDADEDEDDYHNPGYLVVLPDSTPATSTAAPSAPALSTPGIRDSAFSMESIDDYVNVPESGESAEASLDGSREYVNVSQELHPGAAKTEPAALSSQEAEEVEEEGAPDYENLQELNGNS

SEQ ID NO: 30 - protein, 813 aa, Artificial sequence
  Synthetic polypeptide
MLLLVTSLLLCELPHPAFLLIPDIQMTQTTSSLSASLGDRVTISCRASQDISKYLNWYQQKPDGTVKLLIYHTSRLHSGVPSRFSGSGSGTDYSLTISNLEQEDIATYFCQQGNTLPYTFGGGTKLEITGSTSGSGKPGSGEGSTKGEVKLQESGPGLVAPSQSLSVTCTVSGVSLPDYGVSWIRQPPRKGLEWLGVIWGSETTYYNSALKSRLTIIKDNSKSQVFLKMNSLQTDDTAIYYCAKHYYYGGSYAMDYWGQGTSVTVSSAAAIEVMYPPPYLDNEKSNGTIIHVKGKHLCPSPLFPGPSKPFWVLVVVGGVLACYSLLVTVAFIIFWVGSIRNGSEVRDPLVTYEGSNPPASPLQDNLVIALHSYEPSHDGDLGFEKGEQLRILEQSGEWWKAQSLTTGQEGFIPFNFVAKANSLEPEPWFFKNLSRKDAERQLLAPGNTHGSFLIRESESTAGSFSLSVRDFDQNQGEVVKHYKIRNLDNGGFYISPRITFPGLHELVRHYTNASDGLCTRLSRPCQTQKPQKPWWEDEWEVPRETLKLVERLGAGQFGEVWMGYYNGHTKVAVKSLKQGSMSPDAFLAEANLMKQLQHQRLVRLYAVVTQEPIYIITEYMENGSLVDFLKTPSGIKLTINKLLDMAAQIAEGMAFIEERNYIHRDLRAANILVSDTLSCKIADFGLARLIEDNEYTAREGAKFPIKWTAPEAINYGTFTIKSDVWSFGILLTEIVTHGRIPYPGMTNPEVIQNLERGYRMVRPDNCPEELYQLMRLCWKERPEDRPTFDYLRSVLEDFFTATEGQYQPQPGNS

SEQ ID NO: 31 - protein, 684 aa, Artificial sequence
  Synthetic polypeptide
MARSVTLVFLVLVSLTGLYAADIQMTQSPSSLSASVGDRVTITCRASQDVNTAVAWYQQKPGKAPKLLIYSASFLESGVPSRFSGSRSGTDFTLTISSLQPEDFATYYCQQHYTTPPTFGQGTKVEIKGSTSGSGKPGSGEGSGEVQLVESGGGLVQPGGSLRLSCAASGFNIKDTYIHWVRQAPGKGLEWVARIYPTNGYTRYADSVKGRFTISADTSKNTAYLQMNSLRAEDTAVYYCSRWGGDGFYAMDVWGQGTLVTVSSAAAIEVMYPPPYLDNEKSNGTIIHVKGKHLCPSPLFPGPSKPFWVLVVVGGVLACYSLLVTVAFIIFWVGSPNSSASNASGAAAPTLPAHPSTLTHPQRRIDTLNSDGYTPEPARITSPDKPRPMPMDTSVYESPYSDPEELKDKKLFLKRDNLLIADIELGCGNFGSVRQGVYRMRKKQIDVAIKVLKQGTEKADTEEMMREAQIMHQLDNPYIVRLIGVCQAEALMLVMEMAGGGPLHKFLVGKREEIPVSNVAELLHQVSMGMKYLEEKNFVHRDLAARNVLLVNRHYAKISDFGLSKALGADDSYYTARSAGKWPLKWYAPECINFRKFSSRSDVWSYGVTMWEALSYGQKPYKKMKGPEVMAFIEQGKRMECPPECPPELYALMSDCWIYKWEDRPDFLTVEQRMRACYYSLGNS

SEQ ID NO: 32 - protein, 1627 aa, Artificial sequence
  Synthetic polypeptide
MARSVTLVFLVLVSLTGLYAADIQMTQSPSSLSASVGDRVTITCRASQDVNTAVAWYQQKPGKAPKLLIYSASFLESGVPSRFSGSRSGTDFTLTISSLQPEDFATYYCQQHYTTPPTFGQGTKVEIKGSTSGSGKPGSGEGSGEVQLVESGGGLVQPGGSLRLSCAASGFNIKDTYIHWVRQAPGKGLEWVARIYPTNGYTRYADSVKGRFTISADTSKNTAYLQMNSLRAEDTAVYYCSRWGGDGFYAMDVWGQGTLVTVSSAAAIEVMYPPPYLDNEKSNGTIIHVKGKHLCPSPLFPGPSKPFWVLVVVGGVLACYSLLVTVAFIIFWVGGGGSAGAASPCANGCGPGAPSDAEVLHLCRSLEVGTVMTLFYSKKSQRPERKTFQVKLETRQITWSRGADKIEGAIDIREIKEIRPGKTSRDFDRYQEDPAFRPDQSHCFVILYGMEFRLKTLSLQATSEDEVNMWIKGLTWLMEDTLQAPTPLQIERWLRKQFYSVDRNREDRISAKDLKNMLSQVNYRVPNMRFLRERLTDLEQRSGDITYGQFAQLYRSLMYSAQKTMDLPFLEASTLRAGERPELCRVSLPEFQQFLLDYQGELWAVDRLQVQEFMLSFLRDPLREIEEPYFFLDEFVTFLFSKENSVWNSQLDAVCPDTMNNPLSHYWISSSHNTYLTGDQFSSESSLEAYARCLRMGCRCIELDCWDGPDGMPVIYHGHTLTTKIKFSDVLHTIKEHAFVASEYPVILSIEDHCSIAQQRNMAQYFKKVLGDTLLTKPVEISADGLPSPNQLKRKILIKHKKLAEGSAYEEVPTSMMYSENDISNSIKNGILYLEDPVNHEWYPHYFVLTSSKIYYSEETSSDQGNEDEEEPKEVSSSTELHSNEKWFHGKLGAGRDGRHIAERLLTEYCIETGAPDGSFLVRESETFVGDYTLSFWRNGKVQHCRIHSRQDAGTPKFFLTDNLVFDSLYDLITHYQQVPLRCNEFEMRLSEPVPQTNAHESKEWYHASLTRAQAEHMLMRVPRDGAFLVRKRNEPNSYAISFRAEGKIKHCRVQQEGQTVMLGNSEFDSLVDLISYYEKHPLYRKMKLRYPINEEALEKIGTAEPDYGALYEGRNPGFYVEANPMPTFKCAVKALFDYKAQREDELTFIKSAIIQNVEKQEGGWWRGDYGGKKQLWFPSNYVEEMVNPVALEPEREHLDENSPLGDLLRGVLDVPACQIAIRPEGKNNRLFVFSISMASVAHWSLDVAADSQEELQDWVKKIREVAQTADARLTEGKIMERRKKIALELSELVVYCRPVPFDEEKIGTERACYRDMSSFPETKAEKYVNKAKGKKFLQYNRLQLSRIYPKGQRLDSSNYDPLPMWICGSQLVALNFQTPDKPMQMNQALFMTGRHCGYVLQPSTMRDEAFDPFDKSSLRGLEPCAISIEVLGARHLPKNGRGIVCPFVEIEVAGAEYDSTKQKTEFVVDNGLNPVWPAKPFHFQISNPEFAFLRFVVYEEDMFSDQNFLAQATFPVKGLKTGYRAVPLKNNYSEDLELASLLIKIDIFPAKENGDLSPFSGTSLRERGSDASGQLFHGRAREGSFESRYQQPFEDFRISQEHLADHFDSRERRAPRRTRVNGDNRL

SEQ ID NO: 33 - protein, 580 aa, Artificial sequence
  Synthetic polypeptide
MLLLVTSLLLCELPHPAFLLIPDIQMTQTTSSLSASLGDRVTISCRASQDISKYLNWYQQKPDGTVKLLIYHTSRLHSGVPSRFSGSGSGTDYSLTISNLEQEDIATYFCQQGNTLPYTFGGGTKLEITGSTSGSGKPGSGEGSTKGEVKLQESGPGLVAPSQSLSVTCTVSGVSLPDYGVSWIRQPPRKGLEWLGVIWGSETTYYNSALKSRLTIIKDNSKSQVFLKMNSLQTDDTAIYYCAKHYYYGGSYAMDYWGQGTSVTVSSAAATTTPAPRPPTPAPTIASQPLSLRPEACRPAAGGAVHTRGLDFACDIYIWAPLAGTCGVLLLSLVITLYCKGSHCHRLPGSYDSTSSDSLYPRGIQFKRPHTVAPWPPAYPPVTSYPPLSQPDLLPIPRSPQPLGGSHRTPSSRRDSDGANSVASYENEGASGIRGAQAGWGVWGPSWTRLTPVSLPPEPACEDADEDEDDYHNPGYLVVLPDSTPATSTAAPSAPALSTPGIRDSAFSMESIDDYVNVPESGESAEASLDGSREYVNVSQELHPGAAKTEPAALSSQEAEEVEEEGAPDYENLQELNGNS

SEQ ID NO: 34 - protein, 879 aa, Artificial sequence
  Synthetic polypeptide
MARSVTLVFLVLVSLTGLYAADIQMTQSPSSLSASVGDRVTITCRASQDVNTAVAWYQQKPGKAPKLLIYSASFLESGVPSRFSGSRSGTDFTLTISSLQPEDFATYYCQQHYTTPPTFGQGTKVEIKGSTSGSGKPGSGEGSGEVQLVESGGGLVQPGGSLRLSCAASGFNIKDTYIHWVRQAPGKGLEWVARIYPTNGYTRYADSVKGRFTISADTSKNTAYLQMNSLRAEDTAVYYCSRWGGDGFYAMDVWGQGTLVTVSSAAATTTPAPRPPTPAPTIASQPLSLRPEACRPAAGGAVHTRGLDFACDIYIWAPLAGTCGVLLLSLVITLYCKGSGGGGSALRNVPFRSEVLGWDPDSLADYFKKLNYKDCEKAVKKYHIDGARFLNLTENDIQKFPKLRVPILSKLSQEINKNEERRSIFTRKPQVPRFPEETESHEEDNGGWSSFEEDDYESPNDDQDGEDDGDYESPNEEEEAPVEDDADYEPPPSNDEEALQNSILPAKPFPNSNSMYIDRPPSGKTPQQPPVPPQRPMAALPPPPAGRNHSPLPPPQTNHEEPSRSRNHKTAKLPAPSIDRSTKPPLDRSLAPFDREPFTLGKKPPFSDKPSIPAGRSLGEHLPKIQKPPLPPTTERHERSSPLPGKKPPVPKHGWGPDRRENDEDDVHQRPLPQPALLPMSSNTFPSRSTKPSPMNPLPSSHMPGAFSESNSSFPQSASLPPYFSQGPSNRPPIRAEGRNFPLPLPNKPRPPSPAEEENSLNEEWYVSYITRPEAEAALRKINQDGTFLVRDSSKKTTTNPYVLMVLYKDKVYNIQIRYQKESQVYLLGTGLRGKEDFLSVSDIIDYFRKMPLLLIDGKNRGSRYQCTLTHAAGYPGNS

SEQ ID NO: 35 - protein, 576 aa, Artificial sequence
  Synthetic polypeptide
MLLLVTSLLLCELPHPAFLLIPDIQMTQTTSSLSASLGDRVTISCRASQDISKYLNWYQQKPDGTVKLLIYHTSRLHSGVPSRFSGSGSGTDYSLTISNLEQEDIATYFCQQGNTLPYTFGGGTKLEITGSTSGSGKPGSGEGSTKGEVKLQESGPGLVAPSQSLSVTCTVSGVSLPDYGVSWIRQPPRKGLEWLGVIWGSETTYYNSALKSRLTIIKDNSKSQVFLKMNSLQTDDTAIYYCAKHYYYGGSYAMDYWGQGTSVTVSSAAAIEVMYPPPYLDNEKSNGTIIHVKGKHLCPSPLFPGPSKPFWVLVVVGGVLACYSLLVTVAFIIFWVGSHCHRLPGSYDSTSSDSLYPRGIQFKRPHTVAPWPPAYPPVTSYPPLSQPDLLPIPRSPQPLGGSHRTPSSRRDSDGANSVASYENEGASGIRGAQAGWGVWGPSWTRLTPVSLPPEPACEDADEDEDDYHNPGFLVVLPDSTPATSTAAPSAPALSTPGIRDSAFSMESIDDYVNVPESGESAEASLDGSREYVNVSQELHPGAAKTEPAALSSQEAEEVEEEGAPDYENLQELNGNS

SEQ ID NO: 36 - protein, 576 aa, Artificial sequence
  Synthetic polypeptide
MLLLVTSLLLCELPHPAFLLIPDIQMTQTTSSLSASLGDRVTISCRASQDISKYLNWYQQKPDGTVKLLIYHTSRLHSGVPSRFSGSGSGTDYSLTISNLEQEDIATYFCQQGNTLPYTFGGGTKLEITGSTSGSGKPGSGEGSTKGEVKLQESGPGLVAPSQSLSVTCTVSGVSLPDYGVSWIRQPPRKGLEWLGVIWGSETTYYNSALKSRLTIIKDNSKSQVFLKMNSLQTDDTAIYYCAKHYYYGGSYAMDYWGQGTSVTVSSAAAIEVMYPPPYLDNEKSNGTIIHVKGKHLCPSPLFPGPSKPFWVLVVVGGVLACYSLLVTVAFIIFWVGSHCHRLPGSYDSTSSDSLYPRGIQFKRPHTVAPWPPAYPPVTSYPPLSQPDLLPIPRSPQPLGGSHRTPSSRRDSDGANSVASYENEGASGIRGAQAGWGVWGPSWTRLTPVSLPPEPACEDADEDEDDYHNPGYLVVLPDSTPATSTAAPSAPALSTPGIRDSAFSMESIDDFVNVPESGESAEASLDGSREYVNVSQELHPGAAKTEPAALSSQEAEEVEEEGAPDYENLQELNGNS

SEQ ID NO: 37 - protein, 544 aa, Artificial sequence
  Synthetic polypeptide
MLLLVTSLLLCELPHPAFLLIPDIQMTQTTSSLSASLGDRVTISCRASQDISKYLNWYQQKPDGTVKLLIYHTSRLHSGVPSRFSGSGSGTDYSLTISNLEQEDIATYFCQQGNTLPYTFGGGTKLEITGSTSGSGKPGSGEGSTKGEVKLQESGPGLVAPSQSLSVTCTVSGVSLPDYGVSWIRQPPRKGLEWLGVIWGSETTYYNSALKSRLTIIKDNSKSQVFLKMNSLQTDDTAIYYCAKHYYYGGSYAMDYWGQGTSVTVSSAAAESKYGPPCPPCPMALIVLGGVAGLLLFIGLGIFFGSHCHRLPGSYDSTSSDSLYPRGIQFKRPHTVAPWPPAYPPVTSYPPLSQPDLLPIPRSPQPLGGSHRTPSSRRDSDGANSVASYENEGASGIRGAQAGWGVWGPSWTRLTPVSLPPEPACEDADEDEDDYHNPDYLVVLPDSTPATSTAAPSAPALSTPGIRDSAFSMESIDDYVNVPESGESAEASLDGSREYVNVSQELHPGAAKTEPAALSSQEAEEVEEEGAPDYENLQELNGNS

SEQ ID NO: 38 - protein, 573 aa, Artificial sequence
  Synthetic polypeptide
MLLLVTSLLLCELPHPAFLLIPDIQMTQTTSSLSASLGDRVTISCRASQDISKYLNWYQQKPDGTVKLLIYHTSRLHSGVPSRFSGSGSGTDYSLTISNLEQEDIATYFCQQGNTLPYTFGGGTKLEITGSTSGSGKPGSGEGSTKGEVKLQESGPGLVAPSQSLSVTCTVSGVSLPDYGVSWIRQPPRKGLEWLGVIWGSETTYYNSALKSRLTIIKDNSKSQVFLKMNSLQTDDTAIYYCAKHYYYGGSYAMDYWGQGTSVTVSSAAAAMDTGLYICKVELMYPPPYYLGIGNGTQIYVIDPEPCPDSDMALIVLGGVAGLLLFIGLGIFFGSHCHRLPGSYDSTSSDSLYPRGIQFKRPHTVAPWPPAYPPVTSYPPLSQPDLLPIPRSPQPLGGSHRTPSSRRDSDGANSVASYENEGASGIRGAQAGWGVWGPSWTRLTPVSLPPEPACEDADEDEDDYHNPGYLVVLPDSTPATSTAAPSAPALSTPGIRDSAFSMESIDDYVNVPESGESAEASLDGSREYVNVSQELHPGAAKTEPAALSSQEAEEVEEEGAPDYENLQELNGNS

SEQ ID NO: 39 - protein, 544 aa, Artificial sequence
  Synthetic polypeptide
MLLLVTSLLLCELPHPAFLLIPDIQMTQTTSSLSASLGDRVTISCRASQDISKYLNWYQQKPDGTVKLLIYHTSRLHSGVPSRFSGSGSGTDYSLTISNLEQEDIATYFCQQGNTLPYTFGGGTKLEITGSTSGSGKPGSGEGSTKGEVKLQESGPGLVAPSQSLSVTCTVSGVSLPDYGVSWIRQPPRKGLEWLGVIWGSETTYYNSALKSRLTIIKDNSKSQVFLKMNSLQTDDTAIYYCAKHYYYGGSYAMDYWGQGTSVTVSSAAAESKYGPPCPPCPMALIVLGGVAGLLLFIGLGIFFGSHCHRLPGSYDSTSSDSLYPRGIQFKRPHTVAPWPPAYPPVTSYPPLSQPDLLPIPRSPQPLGGSHRTPSSRRDSDGANSVASYENEGASGIRGAQAGWGVWGPSWTRLTPVSLPPEPACEDADEDEDDYHNPGYLVVLPDSTPATSTAAPSAPALSTPGIRDSAFSMESIDDYVNVPESGESAEASLDGSREYVNVSQELHPGAAKTEPAALSSQEAEEVEEEGAPDYENLQELNGNS

SEQ ID NO: 40 - protein, 875 aa, Artificial sequence
  Synthetic polypeptide
MARSVTLVFLVLVSLTGLYAADIQMTQSPSSLSASVGDRVTITCRASQDVNTAVAWYQQKPGKAPKLLIYSASFLESGVPSRFSGSRSGTDFTLTISSLQPEDFATYYCQQHYTTPPTFGQGTKVEIKGSTSGSGKPGSGEGSGEVQLVESGGGLVQPGGSLRLSCAASGFNIKDTYIHWVRQAPGKGLEWVARIYPTNGYTRYADSVKGRFTISADTSKNTAYLQMNSLRAEDTAVYYCSRWGGDGFYAMDVWGQGTLVTVSSAAAIEVMYPPPYLDNEKSNGTIIHVKGKHLCPSPLFPGPSKPFWVLVVVGGVLACYSLLVTVAFIIFWVGSGGGGSALRNVPFRSEVLGWDPDSLADYFKKLNYRDCEKAVKKYHIDGARFLNLTENDIQKFPKLRVPILSKLSQEINKNEERRSIFTRKPQVPRFPEETESHEEDNGGWSSFEEDDYESPNDDQDGEDDGDYESPNEEEEAPVEDDADYEPPPSNDEEALQNSILPAKPFPNSNSMYIDRPPSGKTPQQPPVPPQRPMAALPPPPAGRNHSPLPPPQTNHEEPSRSRNHKTAKLPAPSIDRSTKPPLDRSLAPFDREPFTLGKKPPFSDKPSIPAGRSLGEHLPKIQKPPLPPTTERHERSSPLPGKKPPVPKHGWGPDRRENDEDDVHQRPLPQPALLPMSSNTFPSRSTKPSPMNPLPSSHMPGAFSESNSSFPQSASLPPYFSQGPSNRPPIRAEGRNFPLPLPNKPRPPSPAEEENSLNEEWYVSYITRPEAEAALRKINQDGTFLVRDSSKKTTTNPYVLMVLYKDKVYNIQIRYQKESQVYLLGTGLRGKEDFLSVSDIIDYFRKMPLLLIDGKNRGSRYQCTLTHAAGYPGNS

SEQ ID NO: 41 - protein, 428 aa, Artificial sequence
  Synthetic polypeptide
MARSVTLVFLVLVSLTGLYAADIQMTQSPSSLSASVGDRVTITCRASQDVNTAVAWYQQKPGKAPKLLIYSASFLESGVPSRFSGSRSGTDFTLTISSLQPEDFATYYCQQHYTTPPTFGQGTKVEIKGSTSGSGKPGSGEGSGEVQLVESGGGLVQPGGSLRLSCAASGFNIKDTYIHWVRQAPGKGLEWVARIYPTNGYTRYADSVKGRFTISADTSKNTAYLQMNSLRAEDTAVYYCSRWGGDGFYAMDVWGQGTLVTVSSAAAIEVMYPPPYLDNEKSNGTIIHVKGKHLCPSPLFPGPSKPFWVLVVVGGVLACYSLLVTVAFIIFWVGSKKLVKKFRQKKQRQWIGPTGMNQNMSFHRNHTATVRSHAENPTASHVDNEYSQPPRNSHLSAYPALEGALHRSSMQPDNSSDSDYDLHGAQRL

SEQ ID NO: 42 - protein, 580 aa, Artificial sequence
  Synthetic polypeptide
MARSVTLVFLVLVSLTGLYAADIQMTQSPSSLSASVGDRVTITCRASQDVNTAVAWYQQKPGKAPKLLIYSASFLESGVPSRFSGSRSGTDFTLTISSLQPEDFATYYCQQHYTTPPTFGQGTKVEIKGSTSGSGKPGSGEGSGEVQLVESGGGLVQPGGSLRLSCAASGFNIKDTYIHWVRQAPGKGLEWVARIYPTNGYTRYADSVKGRFTISADTSKNTAYLQMNSLRAEDTAVYYCSRWGGDGFYAMDVWGQGTLVTVSSAAAIEVMYPPPYLDNEKSNGTIIHVKGKHLCPSPLFPGPSKPFWVLVVVGGVLACYSLLVTVAFIIFWVGSLRIKGKYALPVMVNHQHLPTTIPAGSNSYQPVPITIPKEVFMLPIQVQAPPPEDSDSGSDSDYEHYDFSAQPPVALTTFYNSQRHRVTDEEVQQSRFQMPPLEEGLEELHASHIPTANPGHCITDPPSLGPQYHPRSNSESSTSSGEDYCNSPKSKLPPWNPQVFSSERSSFLEQPPNLELAGTQPAFSAGPPADDSSSTSSGEWYQNFQPPPQPPSEEQFGCPGSPSPQPDSTDNDDYDDISAA

SEQ ID NO: 43 - protein, 396 aa, Artificial sequence
  Synthetic polypeptide
MARSVTLVFLVLVSLTGLYAADIQMTQSPSSLSASVGDRVTITCRASQDVNTAVAWYQQKPGKAPKLLIYSASFLESGVPSRFSGSRSGTDFTLTISSLQPEDFATYYCQQHYTTPPTFGQGTKVEIKGSTSGSGKPGSGEGSGEVQLVESGGGLVQPGGSLRLSCAASGFNIKDTYIHWVRQAPGKGLEWVARIYPTNGYTRYADSVKGRFTISADTSKNTAYLQMNSLRAEDTAVYYCSRWGGDGFYAMDVWGQGTLVTVSSAAAIEVMYPPPYLDNEKSNGTIIHVKGKHLCPSPLFPGPSKPFWVLVVVGGVLACYSLLVTVAFIIFWVGSRKELKRKKKWDLEISLDSGHEKKVISSLQEDRHLEEELKCQEQKEEQLQEGVHRKEPQGAT

SEQ ID NO: 44 - protein, 377 aa, Artificial sequence
  Synthetic polypeptide
MARSVTLVFLVLVSLTGLYAADIQMTQSPSSLSASVGDRVTITCRASQDVNTAVAWYQQKPGKAPKLLIYSASFLESGVPSRFSGSRSGTDFTLTISSLQPEDFATYYCQQHYTTPPTFGQGTKVEIKGSTSGSGKPGSGEGSGEVQLVESGGGLVQPGGSLRLSCAASGFNIKDTYIHWVRQAPGKGLEWVARIYPTNGYTRYADSVKGRFTISADTSKNTAYLQMNSLRAEDTAVYYCSRWGGDGFYAMDVWGQGTLVTVSSAAAIEVMYPPPYLDNEKSNGTIIHVKGKHLCPSPLFPGPSKPFWVLVVVGGVLACYSLLVTVAFIIFWVGSKRGRKKLLYIFKQPFMRPVQTTQEEDGCSCRFPEEEEGGCEL

SEQ ID NO: 45 - protein, 374 aa, Artificial sequence
  Synthetic polypeptide
MARSVTLVFLVLVSLTGLYAADIQMTQSPSSLSASVGDRVTITCRASQDVNTAVAWYQQKPGKAPKLLIYSASFLESGVPSRFSGSRSGTDFTLTISSLQPEDFATYYCQQHYTTPPTFGQGTKVEIKGSTSGSGKPGSGEGSGEVQLVESGGGLVQPGGSLRLSCAASGFNIKDTYIHWVRQAPGKGLEWVARIYPTNGYTRYADSVKGRFTISADTSKNTAYLQMNSLRAEDTAVYYCSRWGGDGFYAMDVWGQGTLVTVSSAAAIEVMYPPPYLDNEKSNGTIIHVKGKHLCPSPLFPGPSKPFWVLVVVGGVLACYSLLVTVAFIIFWVRSKRSRLLHSDYMNMTPRRPGPTRKHYQPYAPPRDFAAYRS

SEQ ID NO: 46 - protein, 449 aa, Artificial sequence
  Synthetic polypeptide
MARSVTLVFLVLVSLTGLYAADIQMTQSPSSLSASVGDRVTITCRASQDVNTAVAWYQQKPGKAPKLLIYSASFLESGVPSRFSGSRSGTDFTLTISSLQPEDFATYYCQQHYTTPPTFGQGTKVEIKGSTSGSGKPGSGEGSGEVQLVESGGGLVQPGGSLRLSCAASGFNIKDTYIHWVRQAPGKGLEWVARIYPTNGYTRYADSVKGRFTISADTSKNTAYLQMNSLRAEDTAVYYCSRWGGDGFYAMDVWGQGTLVTVSSAAAIEVMYPPPYLDNEKSNGTIIHVKGKHLCPSPLFPGPSKPFWVLVVVGGVLACYSLLVTVAFIIFWVKRKKQRSRRNDEELETRAHRVATEERGRKPHQIPASTPQNPATSQHPPPPPGHRSQAPSHRPPPPGHRVQHQPQKRPPAPSGTQVHQQKGPPLPRPRVQPKPPHGAAENSLSPSSN

SEQ ID NO: 47 - protein, 934 aa, Artificial sequence
  Synthetic polypeptide
MEFGLSWLFLVAILKGVQCSRDILLTQTPLSLPVSLGDQASISCRSSQSLVHRNGNTYLHWYLQKPGQSPKLLIHKVSNRFSGVPDRFSGSGSGTDFTLKISRVEAEDLGVYFCSQSTHVPPLTFGAGTKLELKGGGGSGGGGSGGGGSEVKLQQSGPSLVEPGASVMISCKASGSSFTGYNMNWVRQNIGKSLEWIGAIDPYYGGTSYNQKFKGRATLTVDKSSSTAYMHLKSLTSEDSAVYYCVSGMKYWGQGTSVTVSSAKTTPPSVYGRVTVSSAEPKSCDKTHTCPPCPAPPVAGPSVFLFPPKPKDTLMISRTPEVTCVVVDVSHEDPEVKFNWYVDGVEVHNAKTKPREEQYQSTYRVVSVLTVLHQDWLNGKEYKCKVSNKALPAPIEKTISKAKGQPREPQVYTLPPSRDELTKNQVSLTCLVKGFYPSDIAVEWESNGQPENNYKTTPPVLDSDGSFFLYSKLTVDKSRWQQGNVFSCSVMHEALHNHYTQKSLSLSPGKKDPKAAAIEVMYPPPYLDNEKSNGTIIHVKGKHLCPSPLFPGPSKPFWVLVVVGGVLACYSLLVTVAFIIFWVGSPNSSASNASGAAAPTLPAHPSTLTHPQRRIDTLNSDGYTPEPARITSPDKPRPMPMDTSVYESPYSDPEELKDKKLFLKRDNLLIADIELGCGNFGSVRQGVYRMRKKQIDVAIKVLKQGTEKADTEEMMREAQIMHQLDNPYIVRLIGVCQAEALMLVMEMAGGGPLHKFLVGKREEIPVSNVAELLHQVSMGMKYLEEKNFVHRDLAARNVLLVNRHYAKISDFGLSKALGADDSYYTARSAGKWPLKWYAPECINFRKFSSRSDVWSYGVTMWEALSYGQKPYKKMKGPEVMAFIEQGKRMECPPECPPELYALMSDCWIYKWEDRPDFLTVEQRMRACYYSLGNS

SEQ ID NO: 48 - protein, 690 aa, Artificial sequence
  Synthetic polypeptide
MVATLLVTSLLLCELPHPAFLLIPDTEVQLVESGGGLVQPGGSLRLSCAASGFTFSSFGMHWVRQAPGKGLEWVAYISSDSSAIYYADTVKGRFTISRDNAKNSLYLQMNSLRDEDTAVYYCGRGRENIYYGSRLDYWGQGTTVTVSSGGGGSGGGGSGGGGSDIQLTQSPSFLSASVGDRVTITCKASQNVDTNVAWYQQKPGKAPKALIYSASYRYSGVPSRFSGSGSGTDFTLTISSLQPEDFATYYCQQYNNYPFTFGQGTKLEIKAAAIEVMYPPPYLDNEKSNGTIIHVKGKHLCPSPLFPGPSKPFWVLVVVGGVLACYSLLVTVAFIIFWVGSPNSSASNASGAAAPTLPAHPSTLTHPQRRIDTLNSDGYTPEPARITSPDKPRPMPMDTSVYESPYSDPEELKDKKLFLKRDNLLIADIELGCGNFGSVRQGVYRMRKKQIDVAIKVLKQGTEKADTEEMMREAQIMHQLDNPYIVRLIGVCQAEALMLVMEMAGGGPLHKFLVGKREEIPVSNVAELLHQVSMGMKYLEEKNFVHRDLAARNVLLVNRHYAKISDFGLSKALGADDSYYTARSAGKWPLKWYAPECINFRKFSSRSDVWSYGVTMWEALSYGQKPYKKMKGPEVMAFIEQGKRMECPPECPPELYALMSDCWIYKWEDRPDFLTVEQRMRACYYSLGNS

SEQ ID NO: 49 - protein, 571 aa, Artificial sequence
  Synthetic polypeptide
MLLLVTSLLLCELPHPAFLLIPQVQLQQSGPGLVKPSQTLSLTCAISGDSVSSNSAAWNWIRQSPSRGLEWLGRTYYRSKWYNDYAVSVKSRITINPDTSKNQFSLQLNSVTPEDTAVYYCAREVTGDLEDAFDIWGQGTMVTVSSGGGGSDIQMTQSPSSLSASVGDRVTITCRASQTIWSYLNWYQQRPGKAPNLLIYAASSLQSGVPSRFSGRGSGTDFTLTISSLQAEDFATYYCQQSYSIPQTFGQGTKLEIKAAATTTPAPRPPTPAPTIASQPLSLRPEACRPAAGGAVHTRGLDFACDIYIWAPLAGTCGVLLLSLVITLYCKGSHCHRLPGSYDSTSSDSLYPRGIQFKRPHTVAPWPPAYPPVTSYPPLSQPDLLPIPRSPQPLGGSHRTPSSRRDSDGANSVASYENEGASGIRGAQAGWGVWGPSWTRLTPVSLPPEPACEDADEDEDDYHNPGYLVVLPDSTPATSTAAPSAPALSTPGIRDSAFSMESIDDYVNVPESGESAEASLDGSREYVNVSQELHPGAAKTEPAALSSQEAEEVEEEGAPDYENLQELNGNS

SEQ ID NO: 50 - DNA, 792 bp, Artificial sequence
  Synthetic polynucleotide
atggctcgctcggtgaccctggtctttctggtgcttgtctcactgaccggtttgtatgctgctgatatccagatgacccagtccccgagctccctgtccgcctctgtgggcgatagggtcaccatcacctgccgtgccagtcaggatgtgaatactgctgtagcctggtatcaacagaaaccaggaaaagctccgaaactactgatttactcggcatccttccttgagtctggagtcccttctcgcttctctggatctagatctgggacggatttcactctgaccatcagcagtctgcagccggaagacttcgcaacttattactgtcagcaacattatactactcctcccacgttcggacagggtaccaaggtggagatcaaagggtctacatctggatctgggaagccgggttctggtgagggttctggtgaggttcagctggtggagtctggcggtggcctggtgcagccagggggctcactccgtttgtcctgtgcagcttctggcttcaacattaaagacacctatatacactgggtgcgtcaggccccgggtaagggcctggaatgggttgcaaggatttatcctacgaatggttatactagatatgccgatagcgtcaagggccgtttcactataagcgcagacacatccaaaaacacagcctacctgcagatgaacagcctgcgtgctgaggacactgccgtctattattgttctagatggggaggggacggcttctatgctatggacgtgtggggtcaaggaaccctggtcaccgtctcctcg

SEQ ID NO: 51 - DNA, 801 bp, Artificial sequence
  Synthetic polynucleotide
atgcttctcctggtgacaagccttctgctctgtgagttaccacacccagcattcctcctgatcccagacatccagatgacacagactacatcctccctgtctgcctctctgggagacagagtcaccatcagttgcagggcaagtcaggacattagtaaatatttaaattggtatcagcagaaaccagatggaactgttaaactcctgatctaccatacatcaagattacactcaggagtcccatcaaggttcagtggcagtgggtctggaacagattattctctcaccattagcaacctggagcaagaagatattgccacttacttttgccaacagggtaatacgcttccgtacacgttcggaggggggactaagttggaaataacaggctccacctctggatccggcaagcccggatctggcgagggatccaccaagggcgaggtgaaactgcaggagtcaggacctggcctggtggcgccctcacagagcctgtccgtcacatgcactgtctcaggggtctcattacccgactatggtgtaagctggattcgccagcctccacgaaagggtctggagtggctgggagtaatatggggtagtgaaaccacatactataattcagctctcaaatccagactgaccatcatcaaggacaactccaagagccaagttttcttaaaaatgaacagtctgcaaactgatgacacagccatttactactgtgccaaacattattactacggtggtagctatgctatggactactggggtcaaggaacctcagtcaccgtctcctca

SEQ ID NO: 52 - DNA, 786 bp, Artificial sequence
  Synthetic polynucleotide
atggaattcggcctgagctggctgttcctggtggccatcctgaagggcgtgcagtgcagcagagacatcctgctgacccagacccctctgagcctgcctgtgtctctgggcgatcaggccagcatcagctgcagatccagccagagcctggtgcaccggaacggcaacacctacctgcactggtatctgcagaagcccggccagagccccaagctgctgatccacaaggtgtccaaccggttcagcggcgtgcccgacagattttctggcagcggctccggcaccgacttcaccctgaagatcagccgggtggaagccgaggacctgggcgtgtacttctgcagccagtccacccacgtgccccccctgacatttggcgccggaacaaagctggaactgaaggggggaggcggatctggcggcggaggaagtggcggagggggatctgaagtgaagctgcagcagtccggccccagcctggtggaacctggcgcctctgtgatgatctcctgcaaggccagcggcagctccttcaccggctacaacatgaactgggtgcgccagaacatcggcaagagcctggaatggatcggcgccatcgacccctactacggcggcaccagctacaaccagaagttcaagggcagagccaccctgaccgtggacaagagcagcagcaccgcctacatgcacctgaagtccctgaccagcgaggacagcgccgtgtactactgcgtgtccggcatgaagtactggggccagggcacaagcgtgaccgtgtctagc

SEQ ID NO: 53 - DNA, 810 bp, Artificial sequence
  Synthetic polynucleotide
atggttgccaccctgctcgtgacaagcctgctgctgtgcgagctgccccaccctgcctttctgctgatccccgataccgaggtgcagctggtggaatctggcggcggactggtgcagcctggcggatctctgagactgagctgtgccgccagcggcttcaccttcagcagcttcggaatgcactgggtgcgccaggcccctggcaaaggactggaatgggtggcctacatcagcagcgacagcagcgccatctactacgccgacaccgtgaagggccggttcaccatctcccgggacaacgccaagaacagcctgtacctgcagatgaactccctgcgggacgaggacaccgccgtgtactattgcggcagaggcagagagaacatctattacggcagcagactggactactggggccagggcacaaccgtgacagtgtctagcggaggcggaggatcaggcggcggaggaagtggcggagggggatctgatatccagctgacccagagccccagcttcctgagcgcctctgtgggcgacagagtgaccatcacatgcaaggccagccagaacgtggacaccaacgtggcctggtatcagcagaagcccggcaaggcccctaaggccctgatctacagcgccagctaccggtacagcggcgtgcccagcagattttctggcagcggctccggcaccgacttcaccctgacaatcagcagcctgcagcccgaggacttcgccacctactactgccagcagtacaacaactaccctttcaccttcggccaggggaccaagctggaaatcaaa

SEQ ID NO: 54 - DNA, 774 bp, Artificial sequence
  Synthetic polynucleotide
atgcttctgctcgtgacaagcctgctgctgtgcgagctgccccaccctgcctttctgctgatccctcaggtgcagctgcagcagtctggccctggcctcgtgaagcctagccagaccctgagcctgacctgtgccatcagcggcgatagcgtgtccagcaatagcgccgcctggaactggatcagacagagccctagcagaggcctggaatggctgggccggacctactaccggtccaagtggtacaacgactacgccgtgtccgtgaagtcccggatcaccatcaaccccgacaccagcaagaaccagttctccctgcagctgaacagcgtgacccccgaggataccgccgtgtactactgcgccagagaagtgaccggcgacctggaagatgccttcgacatctggggccagggcacaatggtcaccgtgtctagcggaggcggcggaagcgacatccagatgacacagagccccagctccctgagcgccagcgtgggagacagagtgaccatcacctgtcgggccagccagaccatctggtcctacctgaactggtatcagcagcggcctggcaaggcccccaacctgctgatctatgccgccagctcactgcagagcggcgtgcccagcagattttccggcagaggcagcggcaccgacttcaccctgacaatcagttccctgcaggccgaggacttcgccacctactactgccagcagagctacagcatcccccagaccttcggccaggggaccaagctggaaatcaaa

SEQ ID NO: 55 - DNA, 207 bp, Artificial sequence
  Synthetic polynucleotide
gcggccgcaatcgaagtgatgtaccctccaccttacctggacaacgagaagtccaacggcaccatcatccacgtgaagggcaagcacctgtgtccttctccactgttccctggacctagcaagcctttctgggtgctcgtggttgttggcggcgtgctggcctgttattctctgctggtcaccgtggccttcatcatcttttgggtc

SEQ ID NO: 56 - DNA, 219 bp, Artificial sequence
  Synthetic polynucleotide
gcggccgcaaccacgacgccagcgccgcgaccaccaacaccggcgcccaccatcgcgtcgcagcccctgtccctgcgcccagaggcgtgccggccagcggcggggggcgcagtgcacacgagggggctggacttcgcctgtgatatctacatctgggcgcccttggccgggacttgtggggtccttctcctgtcactggttatcaccctttactgcaaa

SEQ ID NO: 57 - DNA, 111 bp, Artificial sequence
  Synthetic polynucleotide
gcggccgcagaatccaaatacggaccaccgtgccctccttgtcctatggcgctcatagtcctcggtggcgtagccggacttttgctgtttataggcttggggatcttcttt

SEQ ID NO: 58 - DNA, 198 bp, Artificial sequence
  Synthetic polynucleotide
gcggccgcagcaatggacaccgggctttacatatgcaaggtggagcttatgtatccaccaccatattacctcggtataggtaacggtacgcaaatttatgtgatcgaccctgaaccttgccccgacagtgacatggcgctcatagtcctcggtggcgtagccggacttttgctgtttataggcttggggatcttcttt

SEQ ID NO: 59 - DNA, 963 bp, Artificial sequence
  Synthetic polynucleotide
gccaagaccaccccccctagcgtgtacggaagagtgacagtgtcctctgccgagcccaagagctgcgacaagacccacacctgtcccccttgtcctgcccctcctgttgcaggcccttccgtgttcctgttccccccaaagcccaaggacacactgatgatcagcagaacccccgaagtgacctgcgtggtggtggacgtgtcccacgaggacccagaagtgaagttcaattggtacgtggacggcgtggaagtgcacaacgccaagacaaagcccagagaggaacagtaccaaagcacctaccgggtggtgtccgtgctgaccgtgctgcatcaggattggctgaacggcaaagagtacaagtgcaaagtgtccaacaaggccctgcctgcccccatcgagaaaaccatcagcaaggccaagggccagccccgcgaaccccaggtgtacacactgccccctagcagggacgagctgaccaagaaccaggtgtccctgacatgcctcgtgaagggcttctacccctccgatatcgccgtggaatgggagagcaacggccagcccgagaacaactacaagacaacccctcccgtgctggacagcgacggctcattcttcctgtacagcaagctgacagtggataagtcccggtggcagcagggcaacgtgttcagctgctccgtgatgcacgaggccctgcacaaccactacacccagaaaagcctgtccctgagccccggcaagaaggaccccaaagcggccgcaatcgaagtgatgtaccctccaccttacctggacaacgagaagtccaacggcaccatcatccacgtgaagggcaagcacctgtgtccttctccactgttccctggacctagcaagcctttctgggtgctcgtggttgttggcggcgtgctggcctgttattctctgctggtcaccgtggccttcatcatcttttgggtc

SEQ ID NO: 60 - DNA, 1629 bp, Artificial sequence
  Synthetic polynucleotide
ggatccggcggtggtggatctgctctgagaaacgtgcccttcagatccgaggttctcggctgggaccctgatagcctggccgactacttcaagaagctgaactacaaggactgcgagaaggccgtgaagaagtaccatatcgacggcgccagattcctgaacctgaccgagaacgacatccagaagttccccaagctgagagtgcccatcctgagcaagctgagccaagagatcaacaagaacgaggaacggcggagcatcttcaccagaaagccccaggtgccaagattccccgaggaaacagagagccacgaggaagataacggcggctggtccagcttcgaagaggacgactacgagagccccaacgacgatcaggatggcgaggatgatggcgattacgagtcccctaacgaagaggaagaggcccctgttgaggacgacgccgattatgagcctcctcctagcaacgacgaagaagccctgcagaacagcatcctgcctgccaagccttttccaaacagcaacagcatgtacatcgaccggcctccaagcggcaaaacacctcagcaacctccagttcctcctcagcgacctatggctgcattgcctcctccaccagccggaagaaatcactctccactgcctccacctcagaccaatcacgaggaacccagcagaagcagaaaccacaagaccgccaagctgcccgctccatccatcgatagaagcaccaagcctccactggacagatctctggcccctttcgatagagagcccttcacactgggcaagaagcctccattcagcgacaagcctagcatccctgctggaagaagcctgggcgagcatctgcctaagatccagaaacctcctctgccacctaccaccgagagacacgagagatctagccctctgcctggcaagaaaccacctgtgcctaaacacggctggggcccagacagaagggaaaacgacgaggacgatgtgcaccagaggccattgcctcaacctgctctgctgcccatgtccagcaacacattccccagcaggtccaccaaaccttctccaatgaatcccctgcctagcagccacatgcctggcgcctttagcgagagcaatagcagctttcctcagagcgccagcctgcctccttactttagccagggacctagcaaccggccacctatcagagccgagggcagaaattttcccctgccactgcctaacaagcccagacctccatctcctgccgaggaagagaacagcctgaacgaagagtggtacgtgtcctacatcaccagacctgaagccgaggctgccctgagaaagatcaaccaggatggcacctttctcgtgcgggacagcagcaaaaagaccaccaccaatccttacgtgctgatggtgctgtacaaggacaaggtgtacaacatccagatccgctaccagaaagaaagccaggtgtacctgctcggcaccggcctgagaggcaaagaggattttctgagcgtcagcgacatcatcgactactttagaaagatgcccctgctgctgatcgacggcaagaacagaggcagcagataccagtgcacactgacacacgctgccggctatcccgggaattcctga

SEQ ID NO: 61 - DNA, 1848 bp, Artificial sequence
  Synthetic polynucleotide
gcggccgcaatcgaagtgatgtaccctccaccttacctggacaacgagaagtccaacggcaccatcatccacgtgaagggcaagcacctgtgtccttctccactgttccctggacctagcaagcctttctgggtgctcgtggttgttggcggcgtgctggcctgttattctctgctggtcaccgtggccttcatcatcttttgggtcggatccggcggtggtggatctggatgtgtgcagtgcaaggacaaagaggccaccaagctgaccgaagagagagatggcagcctgaaccagagcagcggctacagatacggcaccgatcctacacctcagcactaccccagcttcggcgtgaccagcattcccaactacaacaactttcacgccgctggcggacagggcctgacagtgtttggcggagtgaatagcagcagccacaccggcacactgagaacaagaggtggaaccggcgtgacactgttcgtggccctgtacgattacgaggccagaaccgaggacgacctgagctttcacaagggcgagaagttccagatcctgaacagcagcgaaggcgattggtgggaagccagaagcctgacaacaggcgagacaggctacatccccagcaattacgtggcccctgtggactctattcaggccgaggaatggtacttcggcaagctgggaagaaaggacgccgagagacagctgctgagcttcggcaatcctagaggcaccttcctgatcagagagagcgagactacaaagggcgcctacagcctgagcatcagagactgggacgacatgaagggcgaccacgtgaagcactacaagatccggaagctggacaacggcggctactacatcaccacaagagcccagttcgagacactgcagcagctggtccagcactactctgaaagagccgccggactctgctgtagactggtggtgccttgtcacaagggaatgcccagactgaccgacctgtccgtgaaaacaaaggacgtgtgggagatccccagagagtccctgcagctgatcaagagactcggcaatggccagttcggcgaagtgtggatgggcacctggaacggaaataccaaggtggccatcaagaccctgaagcctggcacaatgagccccgagtcttttctggaagaggcccagatcatgaagaagctcaagcacgacaagctggtgcagctgtacgccgtggtgtccgaggaacctatctacatcgtgaccgagtacatgaacaagggcagcctgctggacttcctgaaggatggcgaaggcagagccctgaagctgcccaatctggtggatatggctgctcaggtggccgctggaatggcctacatcgagcggatgaactacatccacagggacctgagaagcgccaacatcctcgtcggaaacggcctgatctgcaagatcgccgattttggcctggccagactgatcgaggacaacgagtatacagcccggcagggcgccaagtttcccattaagtggacagcccctgaggccgctctgtacggcagattcaccatcaagtccgacgtgtggtccttcggcatcctgctgaccgagctggtcacaaagggcagagtgccctatcctggcatgaacaaccgggaagtgctggaacaggtggaacggggctacagaatgccctgtcctcaggactgtcctatcagcctgcacgagctgatgatccactgctggaagaaggaccctgaggaacggcctaccttcgagtacctgcagagcttcctggaagattacttcaccgccaccgagcctcagtaccagcctggcgaaaatctggggaattcctga

SEQ ID NO: 62 - DNA, 723 bp, Artificial sequence
  Synthetic polynucleotide
ggatcccactgtcacagactgcctggcagctacgatagcaccagcagcgacagcctgtatcctcggggcatccagttcaagaggcctcatacagttgccccttggcctcctgcctatcctcctgtgacaagctaccctccactgagccaacctgacctgctgcctattcctagatctcctcagcctctcggcggcagccacagaacacctagcagcagaagagatagcgacggcgccaatagcgtggcctcttatgagaatgagggcgcctctggcattagaggcgctcaagctggatggggagtttggggccctagctggacaagactgacacctgtgtctctgcctccagagcctgcctgtgaagatgccgacgaggacgaggatgactatcacaaccctggctacctggtggtgctgcctgatagcacaccagccacatctacagccgctccatctgctccagctctgagcacacctggcatcagagacagcgccttcagcatggaatccatcgacgactacgtgaacgtgccagagtctggcgaatctgccgaagcctctctggacggctcccgggaatatgtgaatgtgtcccaagaactgcaccctggcgccgctaaaacagaacctgctgctctgtctagccaagaggccgaggaagtggaagaagaaggcgcccctgactacgagaacctgcaagagctgaacgggaattcctga

SEQ ID NO: 63 - DNA, 1434 bp, Artificial sequence
  Synthetic polynucleotide
ggatccatccggaacggctctgaagttcgcgatcctctggtcacctacgagggcagcaatcctcctgccagtcctctgcaggataacctcgtgatcgccctgcacagctacgagccttctcatgatggcgacctgggctttgagaagggcgagcagctgagaatcctggaacagtctggcgagtggtggaaggcccagtctctgacaacaggccaagagggcttcatccccttcaacttcgtggccaaggccaacagcctggaacctgagccttggtttttcaagaacctgtccagaaaggacgccgagagacagctgctggcccctggaaatacccacggcagctttctgattagagagagcgagagcacagccggcagcttcagcctgagtgtgcgggactttgaccagaatcaaggcgaggtcgtgaagcactacaagatccggaacctggataacggcggcttctacatcagccccagaatcacctttcctggcctgcacgaactcgtgcggcactacacaaatgcctccgatggcctgtgcaccagactgagcagaccctgtcagacccagaagcctcagaaaccttggtgggaagatgagtgggaagtgcccagagaaaccctgaagctggtggaaagactcggagccggccagtttggagaagtgtggatgggctactacaatggccacaccaaggtggccgtgaagtctctgaagcagggctctatgagcccagatgcttttctggccgaggccaatctgatgaagcagctgcagcaccagagacttgtgcggctgtatgccgtggtcacccaagagcctatctacatcatcaccgagtacatggaaaacggcagcctggtggacttcctgaaaacccctagcggcatcaagctgaccattaacaagctgctggacatggccgctcagatcgccgaaggcatggcctttatcgaggaacggaactacatccacagggacctgagagccgccaatatcctggtgtctgacaccctgagctgcaagattgccgatttcggcctggccagactgatcgaggacaatgagtataccgccagagagggcgccaagtttcccatcaaatggacagcccctgaggccatcaactacggcaccttcaccatcaagagcgacgtgtggtccttcggcatcctgctgacagagatcgtgacacacggcagaatcccatatcctggcatgacaaaccccgaagtgatccagaatctggaacggggctacagaatggtccgacctgacaactgccccgaggaactgtaccagctgatgagactgtgctggaaagagaggcccgaggacagacccaccttcgactacctgagaagcgtgctggaagatttcttcaccgccaccgagggccagtaccagcctcagccagggaattcctga

SEQ ID NO: 64 - DNA, 1056 bp, Artificial sequence
  Synthetic polynucleotide
ggatcccctaacagcagcgcctctaatgctagcggagctgctgctcctacactgcctgctcacccttctacactgacacaccctcagcggcggatcgatacactgaactctgatggctacacccctgagccagccagaatcacaagccccgacaagcccagacctatgcctatggataccagcgtgtacgagagcccctacagcgaccctgaggaactgaaggacaagaagctgttcctgaagcgggacaacctgctgattgccgacatcgaactcggctgcggcaattttggctctgtcagacagggcgtgtaccggatgcggaagaaacagatcgacgtggccatcaaggtgctgaagcagggaaccgagaaggccgataccgaggaaatgatgcgcgaggcccagatcatgcaccagctggacaatccttacatcgtgcggctgatcggcgtgtgtcaagccgaagctctgatgctggttatggaaatggcaggcggcggacccctgcacaagtttctcgttggcaagagagaggaaatccccgtcagcaacgtggccgaactgctgcaccaagtgtctatgggcatgaagtacctggaagagaagaacttcgtgcaccgcgacctggccgccagaaatgtgctgctggtcaacagacactacgccaagatcagcgacttcggcctgtctaaagccctgggcgccgacgatagctactacacagccagatctgccggaaagtggcccctgaagtggtacgcccctgagtgcatcaacttcagaaagttcagcagccgcagcgacgtgtggtcttacggcgttacaatgtgggaagccctgagctacggccagaaaccttacaagaagatgaagggccccgaagtcatggccttcatcgaacagggcaagagaatggaatgccctcctgagtgccctccagagctgtatgccctgatgagcgactgctggatctataagtgggaagatcggcccgacttcctgaccgtggaacagagaatgagagcctgctactacagcctggggaattcctga

SEQ ID NO: 65 - DNA, 3885 bp, Artificial sequence
  Synthetic polynucleotide
ggaggcggaggaagcgctggcgctgcttctccttgtgctaatggatgtggacctggcgctccatctgatgccgaagtgctgcacctgtgcagatctctggaagtgggcaccgtgatgaccctgttctacagcaagaagtcccagcggcctgagagaaagaccttccaagtgaagctggaaacccggcagatcacctggtctagaggcgccgataagatcgagggcgccatcgacatcagagagatcaaagagatcagacccggcaagaccagccgggacttcgacagatatcaagaggaccccgccttcagacccgaccagagccactgttttgtgatcctgtacggcatggaatttcggctgaaaacactgagtctgcaggccaccagcgaggacgaagtgaacatgtggatcaagggcctgacctggctgatggaagataccctgcaagcccctacaccactgcagatcgagagatggctgcggaagcagttctactccgtggaccggaacagagaggacagaatcagcgccaaggacctgaagaacatgctgagccaagtgaactacagagtgcccaatatgcggttcctgagagagcggctgacagacctcgaacagagaagcggcgatatcacctacggccagttcgcccagctgtacagatccctgatgtacagcgcccagaaaacaatggacctgcctttcctggaagccagcacactgagagccggcgaaagacctgagctgtgtagagtgtccctgcctgagttccagcagttcctgctggattatcagggcgagctgtgggccgtcgatagactgcaggtccaagagtttatgctgagcttcctgcgggaccctctgagagagatcgaggaaccctacttcttcctggacgaatttgtgaccttcctgttcagcaaagagaacagcgtctggaacagccagctggacgccgtgtgtcccgacaccatgaacaatcctctgagccactactggatcagcagcagccacaatacctacctgaccggcgatcagttcagcagcgagagcagtctggaagcctacgccagatgcctgagaatgggctgcagatgcatcgagctggattgctgggatggccctgatggcatgcctgtgatctaccacggccacacactgaccaccaagatcaagttcagcgacgtgctgcacaccatcaaagaacacgccttcgtggccagcgagtaccccgtgattctgagcatcgaggaccactgctctatcgcccagcagaggaacatggcccagtacttcaagaaggtgctgggagacaccctgctgaccaagcctgtggaaatctctgccgatggcctgccttctccaaaccagctgaagcggaagatcctgatcaagcacaagaagctggccgagggcagcgcctatgaagaggtgccaaccagcatgatgtactccgagaacgacatcagcaacagcatcaagaacggcatcctgtacctggaagatcccgtgaaccacgagtggtatccccactacttcgtgctgaccagctccaagatctactacagcgaggaaaccagcagcgaccagggcaacgaggatgaagaggaacccaaagaggtgtccagcagcaccgagctgcacagcaatgagaagtggtttcacggcaagctcggcgctggcagagatggcagacatattgccgagagactgctgaccgagtactgcattgaaacaggcgcccctgacggcagctttctcgtgcgggaatctgagacattcgtgggcgactacaccctgagcttttggagaaacggcaaggtccagcactgcagaatccacagcagacaggacgccggcacacccaagttctttctgaccgacaacctggtgttcgacagcctgtacgacctgatcacccactaccagcaggtcccactgagatgcaacgagttcgagatgagactgagcgagcccgtgcctcagacaaacgcccacgagagcaaagaatggtatcacgccagcctgacaagagcccaggccgagcacatgctgatgagagttcctagagatggcgccttcctcgtgcggaagagaaacgagcctaacagctacgccatcagcttcagagccgagggaaagattaagcactgccgggtgcagcaagagggccagacagtgatgctgggcaacagcgagttcgattccctggtggatctgatcagctactacgagaagcaccctctctaccggaagatgaagctgagataccccatcaacgaggaagccctggaaaagatcggcaccgccgaacctgattacggcgccctgtatgagggcagaaaccccggcttctacgtggaagctaaccccatgcctaccttcaagtgtgccgtgaaggccctgttcgactacaaggcccaaagagaggacgagctgaccttcatcaagagcgccatcattcagaacgtcgagaagcaagaaggcggctggtggcggggagattatggcggaaagaaacagctgtggttccccagcaactatgtggaagagatggtcaaccccgtggcactggaacccgagagagaacaccttgacgagaacagccctctgggcgatctgctgagaggtgttctggatgtgcctgcctgccagatcgccattagacccgagggcaagaacaaccggctgttcgtgttcagcatctctatggcctctgtggcccattggtcactggatgtggccgccgattctcaagaggaactgcaggactgggtcaagaaaatcagagaggtggcccagaccgccgatgccagactgacagagggcaaaatcatggaacggcggaagaagatcgccctggaactgtctgagctggtggtgtactgcagacccgtgcctttcgacgaagagaagattggcaccgagcgggcctgctacagagacatgagcagctttccagagacaaaggccgagaaatacgtgaacaaggccaagggaaagaagttcctgcagtataaccggctgcagctgagcagaatctaccccaagggccagagactggacagctccaactacgaccctctgcctatgtggatctgtggctctcagctggtggctctgaactttcagacccctgacaagcccatgcagatgaaccaggctctgttcatgaccggcagacactgcggatatgtgctgcagccctccaccatgagagatgaggccttcgatcccttcgacaagagcagcctgagaggcctggaaccttgtgccatcagcattgaggtcctgggcgccagacatctgcctaagaatggcagaggcatcgtgtgccccttcgtggaaattgaagtggctggcgccgagtacgacagcaccaagcagaaaaccgagttcgtggtggacaacggactgaaccctgtgtggcctgccaagccattccacttccaaatcagcaaccccgagttcgccttcctgagattcgtggtgtacgaagaggacatgttctccgaccagaacttcctggcacaggccacctttccagtgaagggactgaaaaccggctaccgggccgtgcctctgaaaaacaactactccgaggatctggaactggccagcctgctgatcaagatcgacatcttccccgccaaagaaaacggcgatctgagcccttttagcggcaccagcctcagagagagaggatctgacgcttctggccagctgttccacggtagagccagagagggcagcttcgagagcagataccagcagcctttcgaggacttccggatctctcaagagcacctggccgaccacttcgactctagagaaagaagggcccctcggagaaccagagtgaacggcgacaacagactctga

SEQ ID NO: 66 - DNA, 723 bp, Artificial sequence
  Synthetic polynucleotide
ggatcccactgtcacagactgcctggcagctacgatagcaccagcagcgacagcctgtatcctcggggcatccagttcaagaggcctcatacagttgccccttggcctcctgcctatcctcctgtgacaagctaccctccactgagccaacctgacctgctgcctattcctagatctcctcagcctctcggcggcagccacagaacacctagcagcagaagagatagcgacggcgccaatagcgtggcctcttatgagaatgagggcgcctctggcattagaggcgctcaagctggatggggagtttggggccctagctggacaagactgacacctgtgtctctgcctccagagcctgcctgtgaagatgccgacgaggacgaggatgactatcacaaccctggcttcctggtggtgctgcctgatagcacaccagccacatctacagccgctccatctgctccagctctgagcacacctggcatcagagacagcgccttcagcatggaatccatcgacgactacgtgaacgtgccagagtctggcgaatctgccgaagcctctctggacggctcccgggaatatgtgaatgtgtcccaagaactgcaccctggcgccgctaaaacagaacctgctgctctgtctagccaagaggccgaggaagtggaagaagaaggcgcccctgactacgagaacctgcaagagctgaacgggaattcctga

SEQ ID NO: 67 - DNA, 723 bp, Artificial sequence
  Synthetic polynucleotide
ggatcccactgtcacagactgcctggcagctacgatagcaccagcagcgacagcctgtatcctcggggcatccagttcaagaggcctcatacagttgccccttggcctcctgcctatcctcctgtgacaagctaccctccactgagccaacctgacctgctgcctattcctagatctcctcagcctctcggcggcagccacagaacacctagcagcagaagagatagcgacggcgccaatagcgtggcctcttatgagaatgagggcgcctctggcattagaggcgctcaagctggatggggagtttggggccctagctggacaagactgacacctgtgtctctgcctccagagcctgcctgtgaagatgccgacgaggacgaggatgactatcacaaccctggctacctggtggtgctgcctgatagcacaccagccacatctacagccgctccatctgctccagctctgagcacacctggcatcagagacagcgccttcagcatggaatccatcgacgacttcgtgaacgtgccagagtctggcgaatctgccgaagcctctctggacggctcccgggaatatgtgaatgtgtcccaagaactgcaccctggcgccgctaaaacagaacctgctgctctgtctagccaagaggccgaggaagtggaagaagaaggcgcccctgactacgagaacctgcaagagctgaacgggaattcctga

SEQ ID NO: 68 - DNA, 723 bp, Artificial sequence
  Synthetic polynucleotide
ggatcccactgtcacagactgcctggcagctacgatagcaccagcagcgacagcctgtatcctcggggcatccagttcaagaggcctcatacagttgccccttggcctcctgcctatcctcctgtgacaagctaccctccactgagccaacctgacctgctgcctattcctagatctcctcagcctctcggcggcagccacagaacacctagcagcagaagagatagcgacggcgccaatagcgtggcctcttatgagaatgagggcgcctctggcattagaggcgctcaagctggatggggagtttggggccctagctggacaagactgacacctgtgtctctgcctccagagcctgcctgtgaagatgccgacgaggacgaggatgactatcacaaccctgactacctggtggtgctgcctgatagcacaccagccacatctacagccgctccatctgctccagctctgagcacacctggcatcagagacagcgccttcagcatggaatccatcgacgactacgtgaacgtgccagagtctggcgaatctgccgaagcctctctggacggctcccgggaatatgtgaatgtgtcccaagaactgcaccctggcgccgctaaaacagaacctgctgctctgtctagccaagaggccgaggaagtggaagaagaaggcgcccctgactacgagaacctgcaagagctgaacgggaattcctga

SEQ ID NO: 69 - DNA, 1629 bp, Artificial sequence
  Synthetic polynucleotide
ggatccggcggtggtggatctgctctgagaaacgtgcccttcagatccgaggttctcggctgggaccctgatagcctggccgactacttcaagaagctgaactacagggactgcgagaaggccgtgaagaagtaccatatcgacggcgccagattcctgaacctgaccgagaacgacatccagaagttccccaagctgagagtgcccatcctgagcaagctgagccaagagatcaacaagaacgaggaacggcggagcatcttcaccagaaagccccaggtgccaagattccccgaggaaacagagagccacgaggaagataacggcggctggtccagcttcgaagaggacgactacgagagccccaacgacgatcaggatggcgaggatgatggcgattacgagtcccctaacgaagaggaagaggcccctgttgaggacgacgccgattatgagcctcctcctagcaacgacgaagaagccctgcagaacagcatcctgcctgccaagccttttccaaacagcaacagcatgtacatcgaccggcctccaagcggcaaaacacctcagcaacctccagttcctcctcagcgacctatggctgcattgcctcctccaccagccggaagaaatcactctccactgcctccacctcagaccaatcacgaggaacccagcagaagcagaaaccacaagaccgccaagctgcccgctccatccatcgatagaagcaccaagcctccactggacagatctctggcccctttcgatagagagcccttcacactgggcaagaagcctccattcagcgacaagcctagcatccctgctggaagaagcctgggcgagcatctgcctaagatccagaaacctcctctgccacctaccaccgagagacacgagagatctagccctctgcctggcaagaaaccacctgtgcctaaacacggctggggcccagacagaagggaaaacgacgaggacgatgtgcaccagaggccattgcctcaacctgctctgctgcccatgtccagcaacacattccccagcaggtccaccaaaccttctccaatgaatcccctgcctagcagccacatgcctggcgcctttagcgagagcaatagcagctttcctcagagcgccagcctgcctccttactttagccagggacctagcaaccggccacctatcagagccgagggcagaaattttcccctgccactgcctaacaagcccagacctccatctcctgccgaggaagagaacagcctgaacgaagagtggtacgtgtcctacatcaccagacctgaagccgaggctgccctgagaaagatcaaccaggatggcacctttctcgtgcgggacagcagcaaaaagaccaccaccaatccttacgtgctgatggtgctgtacaaggacaaggtgtacaacatccagatccgctaccagaaagaaagccaggtgtacctgctcggcaccggcctgagaggcaaagaggattttctgagcgtcagcgacatcatcgactactttagaaagatgcccctgctgctgatcgacggcaagaacagaggcagcagataccagtgcacactgacacacgctgccggctatcccgggaattcctga

SEQ ID NO: 70 - DNA, 288 bp, Artificial sequence
  Synthetic polynucleotide
ggatccaagaaacttgtcaagaaattccgacagaaaaagcaaagacaatggattggcccaactggaatgaaccaaaacatgagctttcatagaaatcatactgcgacagttcgctctcatgccgagaatcccacagcgtcacacgttgataacgaatacagccaaccgcctagaaattcacacctgagtgcttatcctgcccttgaaggggcccttcatcggtcttctatgcaaccggataattcttctgactcagactatgatttgcacggcgctcaacgcctgtga

SEQ ID NO: 71 - DNA, 744 bp, Artificial sequence
  Synthetic polynucleotide
ggatccctcaggatcaaagggaagtacgctctccccgttatggttaaccaccaacacctgcctactacaatccccgccggaagtaatagttatcaacccgttcctattacgataccaaaagaggtgttcatgctccctatacaggtccaagcaccacctccagaagactcagactccggctccgattccgattatgaacattatgacttctccgcacagcctccggtggcactcacgactttctacaatagccagaggcaccgggtgacagatgaagaggttcagcagtcacggttccaaatgccgccgctggaggaagggcttgaagagttgcacgcttcacatatccccaccgccaaccccgggcattgcattactgacccaccgtctttgggcccgcaataccatcccaggtcaaattcagaatcatcaacttcaagcggggaggactactgtaacagcccaaagagcaaacttccgccatggaacccacaagtcttctcttcagaacgatcatcttttttggaacaaccacctaatttggaattggctggaacccaaccggctttctctgctgggccgcccgcagatgacagctcctctactagcagcggggaatggtatcagaacttccagcctccacctcagcctccaagtgaagaacagttcgggtgccctggctcacctagtccccagccggacagcacggacaacgatgattacgatgacatcagtgcagcctga

SEQ ID NO: 72 - DNA, 192 bp, Artificial sequence
  Synthetic polynucleotide
ggatccagaaaagagctcaagcggaagaagaagtgggatcttgaaatatcactcgactctgggcacgagaagaaagtcattagctcccttcaggaagaccggcacctggaagaagaactcaagtgccaggaacagaaagaagagcaactccaggagggagtacaccgaaaagaaccccaaggggccacctga

SEQ ID NO: 73 - DNA, 135 bp, Artificial sequence
  Synthetic polynucleotide
ggatccaagcggggcagaaagaagctgctgtacatcttcaagcagcccttcatgcggcccgtgcagaccacacaagaggaagatggctgctcctgcagattccccgaggaagaagaaggcggctgcgagctgtga

SEQ ID NO: 74 - DNA, 126 bp, Artificial sequence
  Synthetic polynucleotide
aggagtaagaggagcaggctcctgcacagtgactacatgaacatgactccccgccgccccgggcccacccgcaagcattaccagccctatgccccaccacgcgacttcgcagcctatcgctcctga

SEQ ID NO: 75 - DNA, 351 bp, Artificial sequence
  Synthetic polynucleotide
aagcggaagaagcagcggagcagacggaacgacgaggaactggaaacaagagcccacagagtggccaccgaggaaagaggcagaaagccccaccagattccagcctccacacctcagaatcccgccacatctcaacaccctccacctccacctggacacagatctcaggccccatctcatagaccaccacctccaggacacagagtgcagcaccagcctcagaaaagacctcctgcacctagcggaacacaggtgcaccagcaaaaaggccctccactgcctagacctagggtgcagcctaaacctcctcatggcgccgctgagaatagcctgtctcctagcagcaactaa

SEQ ID NO: 76 - DNA, 2628 bp, Artificial sequence
  Synthetic polynucleotide
atggctcgctcggtgaccctggtctttctggtgcttgtctcactgaccggtttgtatgctgctgatatccagatgacccagtccccgagctccctgtccgcctctgtgggcgatagggtcaccatcacctgccgtgccagtcaggatgtgaatactgctgtagcctggtatcaacagaaaccaggaaaagctccgaaactactgatttactcggcatccttccttgagtctggagtcccttctcgcttctctggatctagatctgggacggatttcactctgaccatcagcagtctgcagccggaagacttcgcaacttattactgtcagcaacattatactactcctcccacgttcggacagggtaccaaggtggagatcaaagggtctacatctggatctgggaagccgggttctggtgagggttctggtgaggttcagctggtggagtctggcggtggcctggtgcagccagggggctcactccgtttgtcctgtgcagcttctggcttcaacattaaagacacctatatacactgggtgcgtcaggccccgggtaagggcctggaatgggttgcaaggatttatcctacgaatggttatactagatatgccgatagcgtcaagggccgtttcactataagcgcagacacatccaaaaacacagcctacctgcagatgaacagcctgcgtgctgaggacactgccgtctattattgttctagatggggaggggacggcttctatgctatggacgtgtggggtcaaggaaccctggtcaccgtctcctcggcggccgcaatcgaagtgatgtaccctccaccttacctggacaacgagaagtccaacggcaccatcatccacgtgaagggcaagcacctgtgtccttctccactgttccctggacctagcaagcctttctgggtgctcgtggttgttggcggcgtgctggcctgttattctctgctggtcaccgtggccttcatcatcttttgggtcggatccggcggtggtggatctgctctgagaaacgtgcccttcagatccgaggttctcggctgggaccctgatagcctggccgactacttcaagaagctgaactacaaggactgcgagaaggccgtgaagaagtaccatatcgacggcgccagattcctgaacctgaccgagaacgacatccagaagttccccaagctgagagtgcccatcctgagcaagctgagccaagagatcaacaagaacgaggaacggcggagcatcttcaccagaaagccccaggtgccaagattccccgaggaaacagagagccacgaggaagataacggcggctggtccagcttcgaagaggacgactacgagagccccaacgacgatcaggatggcgaggatgatggcgattacgagtcccctaacgaagaggaagaggcccctgttgaggacgacgccgattatgagcctcctcctagcaacgacgaagaagccctgcagaacagcatcctgcctgccaagccttttccaaacagcaacagcatgtacatcgaccggcctccaagcggcaaaacacctcagcaacctccagttcctcctcagcgacctatggctgcattgcctcctccaccagccggaagaaatcactctccactgcctccacctcagaccaatcacgaggaacccagcagaagcagaaaccacaagaccgccaagctgcccgctccatccatcgatagaagcaccaagcctccactggacagatctctggcccctttcgatagagagcccttcacactgggcaagaagcctccattcagcgacaagcctagcatccctgctggaagaagcctgggcgagcatctgcctaagatccagaaacctcctctgccacctaccaccgagagacacgagagatctagccctctgcctggcaagaaaccacctgtgcctaaacacggctggggcccagacagaagggaaaacgacgaggacgatgtgcaccagaggccattgcctcaacctgctctgctgcccatgtccagcaacacattccccagcaggtccaccaaaccttctccaatgaatcccctgcctagcagccacatgcctggcgcctttagcgagagcaatagcagctttcctcagagcgccagcctgcctccttactttagccagggacctagcaaccggccacctatcagagccgagggcagaaattttcccctgccactgcctaacaagcccagacctccatctcctgccgaggaagagaacagcctgaacgaagagtggtacgtgtcctacatcaccagacctgaagccgaggctgccctgagaaagatcaaccaggatggcacctttctcgtgcgggacagcagcaaaaagaccaccaccaatccttacgtgctgatggtgctgtacaaggacaaggtgtacaacatccagatccgctaccagaaagaaagccaggtgtacctgctcggcaccggcctgagaggcaaagaggattttctgagcgtcagcgacatcatcgactactttagaaagatgcccctgctgctgatcgacggcaagaacagaggcagcagataccagtgcacactgacacacgctgccggctatcccgggaattcctga

SEQ ID NO: 77 - DNA, 2847 bp, Artificial sequence
  Synthetic polynucleotide
atggctcgctcggtgaccctggtctttctggtgcttgtctcactgaccggtttgtatgctgctgatatccagatgacccagtccccgagctccctgtccgcctctgtgggcgatagggtcaccatcacctgccgtgccagtcaggatgtgaatactgctgtagcctggtatcaacagaaaccaggaaaagctccgaaactactgatttactcggcatccttccttgagtctggagtcccttctcgcttctctggatctagatctgggacggatttcactctgaccatcagcagtctgcagccggaagacttcgcaacttattactgtcagcaacattatactactcctcccacgttcggacagggtaccaaggtggagatcaaagggtctacatctggatctgggaagccgggttctggtgagggttctggtgaggttcagctggtggagtctggcggtggcctggtgcagccagggggctcactccgtttgtcctgtgcagcttctggcttcaacattaaagacacctatatacactgggtgcgtcaggccccgggtaagggcctggaatgggttgcaaggatttatcctacgaatggttatactagatatgccgatagcgtcaagggccgtttcactataagcgcagacacatccaaaaacacagcctacctgcagatgaacagcctgcgtgctgaggacactgccgtctattattgttctagatggggaggggacggcttctatgctatggacgtgtggggtcaaggaaccctggtcaccgtctcctcggcggccgcaatcgaagtgatgtaccctccaccttacctggacaacgagaagtccaacggcaccatcatccacgtgaagggcaagcacctgtgtccttctccactgttccctggacctagcaagcctttctgggtgctcgtggttgttggcggcgtgctggcctgttattctctgctggtcaccgtggccttcatcatcttttgggtcgcggccgcaatcgaagtgatgtaccctccaccttacctggacaacgagaagtccaacggcaccatcatccacgtgaagggcaagcacctgtgtccttctccactgttccctggacctagcaagcctttctgggtgctcgtggttgttggcggcgtgctggcctgttattctctgctggtcaccgtggccttcatcatcttttgggtcggatccggcggtggtggatctggatgtgtgcagtgcaaggacaaagaggccaccaagctgaccgaagagagagatggcagcctgaaccagagcagcggctacagatacggcaccgatcctacacctcagcactaccccagcttcggcgtgaccagcattcccaactacaacaactttcacgccgctggcggacagggcctgacagtgtttggcggagtgaatagcagcagccacaccggcacactgagaacaagaggtggaaccggcgtgacactgttcgtggccctgtacgattacgaggccagaaccgaggacgacctgagctttcacaagggcgagaagttccagatcctgaacagcagcgaaggcgattggtgggaagccagaagcctgacaacaggcgagacaggctacatccccagcaattacgtggcccctgtggactctattcaggccgaggaatggtacttcggcaagctgggaagaaaggacgccgagagacagctgctgagcttcggcaatcctagaggcaccttcctgatcagagagagcgagactacaaagggcgcctacagcctgagcatcagagactgggacgacatgaagggcgaccacgtgaagcactacaagatccggaagctggacaacggcggctactacatcaccacaagagcccagttcgagacactgcagcagctggtccagcactactctgaaagagccgccggactctgctgtagactggtggtgccttgtcacaagggaatgcccagactgaccgacctgtccgtgaaaacaaaggacgtgtgggagatccccagagagtccctgcagctgatcaagagactcggcaatggccagttcggcgaagtgtggatgggcacctggaacggaaataccaaggtggccatcaagaccctgaagcctggcacaatgagccccgagtcttttctggaagaggcccagatcatgaagaagctcaagcacgacaagctggtgcagctgtacgccgtggtgtccgaggaacctatctacatcgtgaccgagtacatgaacaagggcagcctgctggacttcctgaaggatggcgaaggcagagccctgaagctgcccaatctggtggatatggctgctcaggtggccgctggaatggcctacatcgagcggatgaactacatccacagggacctgagaagcgccaacatcctcgtcggaaacggcctgatctgcaagatcgccgattttggcctggccagactgatcgaggacaacgagtatacagcccggcagggcgccaagtttcccattaagtggacagcccctgaggccgctctgtacggcagattcaccatcaagtccgacgtgtggtccttcggcatcctgctgaccgagctggtcacaaagggcagagtgccctatcctggcatgaacaaccgggaagtgctggaacaggtggaacggggctacagaatgccctgtcctcaggactgtcctatcagcctgcacgagctgatgatccactgctggaagaaggaccctgaggaacggcctaccttcgagtacctgcagagcttcctggaagattacttcaccgccaccgagcctcagtaccagcctggcgaaaatctggggaattcctga

SEQ ID NO: 78 - DNA, 1731 bp, Artificial sequence
  Synthetic polynucleotide
atgcttctcctggtgacaagccttctgctctgtgagttaccacacccagcattcctcctgatcccagacatccagatgacacagactacatcctccctgtctgcctctctgggagacagagtcaccatcagttgcagggcaagtcaggacattagtaaatatttaaattggtatcagcagaaaccagatggaactgttaaactcctgatctaccatacatcaagattacactcaggagtcccatcaaggttcagtggcagtgggtctggaacagattattctctcaccattagcaacctggagcaagaagatattgccacttacttttgccaacagggtaatacgcttccgtacacgttcggaggggggactaagttggaaataacaggctccacctctggatccggcaagcccggatctggcgagggatccaccaagggcgaggtgaaactgcaggagtcaggacctggcctggtggcgccctcacagagcctgtccgtcacatgcactgtctcaggggtctcattacccgactatggtgtaagctggattcgccagcctccacgaaagggtctggagtggctgggagtaatatggggtagtgaaaccacatactataattcagctctcaaatccagactgaccatcatcaaggacaactccaagagccaagttttcttaaaaatgaacagtctgcaaactgatgacacagccatttactactgtgccaaacattattactacggtggtagctatgctatggactactggggtcaaggaacctcagtcaccgtctcctcagcggccgcaatcgaagtgatgtaccctccaccttacctggacaacgagaagtccaacggcaccatcatccacgtgaagggcaagcacctgtgtccttctccactgttccctggacctagcaagcctttctgggtgctcgtggttgttggcggcgtgctggcctgttattctctgctggtcaccgtggccttcatcatcttttgggtcggatcccactgtcacagactgcctggcagctacgatagcaccagcagcgacagcctgtatcctcggggcatccagttcaagaggcctcatacagttgccccttggcctcctgcctatcctcctgtgacaagctaccctccactgagccaacctgacctgctgcctattcctagatctcctcagcctctcggcggcagccacagaacacctagcagcagaagagatagcgacggcgccaatagcgtggcctcttatgagaatgagggcgcctctggcattagaggcgctcaagctggatggggagtttggggccctagctggacaagactgacacctgtgtctctgcctccagagcctgcctgtgaagatgccgacgaggacgaggatgactatcacaaccctggctacctggtggtgctgcctgatagcacaccagccacatctacagccgctccatctgctccagctctgagcacacctggcatcagagacagcgccttcagcatggaatccatcgacgactacgtgaacgtgccagagtctggcgaatctgccgaagcctctctggacggctcccgggaatatgtgaatgtgtcccaagaactgcaccctggcgccgctaaaacagaacctgctgctctgtctagccaagaggccgaggaagtggaagaagaaggcgcccctgactacgagaacctgcaagagctgaacgggaattcctga

SEQ ID NO: 79 - DNA, 2442 bp, Artificial sequence
  Synthetic polynucleotide
atgcttctcctggtgacaagccttctgctctgtgagttaccacacccagcattcctcctgatcccagacatccagatgacacagactacatcctccctgtctgcctctctgggagacagagtcaccatcagttgcagggcaagtcaggacattagtaaatatttaaattggtatcagcagaaaccagatggaactgttaaactcctgatctaccatacatcaagattacactcaggagtcccatcaaggttcagtggcagtgggtctggaacagattattctctcaccattagcaacctggagcaagaagatattgccacttacttttgccaacagggtaatacgcttccgtacacgttcggaggggggactaagttggaaataacaggctccacctctggatccggcaagcccggatctggcgagggatccaccaagggcgaggtgaaactgcaggagtcaggacctggcctggtggcgccctcacagagcctgtccgtcacatgcactgtctcaggggtctcattacccgactatggtgtaagctggattcgccagcctccacgaaagggtctggagtggctgggagtaatatggggtagtgaaaccacatactataattcagctctcaaatccagactgaccatcatcaaggacaactccaagagccaagttttcttaaaaatgaacagtctgcaaactgatgacacagccatttactactgtgccaaacattattactacggtggtagctatgctatggactactggggtcaaggaacctcagtcaccgtctcctcagcggccgcaatcgaagtgatgtaccctccaccttacctggacaacgagaagtccaacggcaccatcatccacgtgaagggcaagcacctgtgtccttctccactgttccctggacctagcaagcctttctgggtgctcgtggttgttggcggcgtgctggcctgttattctctgctggtcaccgtggccttcatcatcttttgggtcggatccatccggaacggctctgaagttcgcgatcctctggtcacctacgagggcagcaatcctcctgccagtcctctgcaggataacctcgtgatcgccctgcacagctacgagccttctcatgatggcgacctgggctttgagaagggcgagcagctgagaatcctggaacagtctggcgagtggtggaaggcccagtctctgacaacaggccaagagggcttcatccccttcaacttcgtggccaaggccaacagcctggaacctgagccttggtttttcaagaacctgtccagaaaggacgccgagagacagctgctggcccctggaaatacccacggcagctttctgattagagagagcgagagcacagccggcagcttcagcctgagtgtgcgggactttgaccagaatcaaggcgaggtcgtgaagcactacaagatccggaacctggataacggcggcttctacatcagccccagaatcacctttcctggcctgcacgaactcgtgcggcactacacaaatgcctccgatggcctgtgcaccagactgagcagaccctgtcagacccagaagcctcagaaaccttggtgggaagatgagtgggaagtgcccagagaaaccctgaagctggtggaaagactcggagccggccagtttggagaagtgtggatgggctactacaatggccacaccaaggtggccgtgaagtctctgaagcagggctctatgagcccagatgcttttctggccgaggccaatctgatgaagcagctgcagcaccagagacttgtgcggctgtatgccgtggtcacccaagagcctatctacatcatcaccgagtacatggaaaacggcagcctggtggacttcctgaaaacccctagcggcatcaagctgaccattaacaagctgctggacatggccgctcagatcgccgaaggcatggcctttatcgaggaacggaactacatccacagggacctgagagccgccaatatcctggtgtctgacaccctgagctgcaagattgccgatttcggcctggccagactgatcgaggacaatgagtataccgccagagagggcgccaagtttcccatcaaatggacagcccctgaggccatcaactacggcaccttcaccatcaagagcgacgtgtggtccttcggcatcctgctgacagagatcgtgacacacggcagaatcccatatcctggcatgacaaaccccgaagtgatccagaatctggaacggggctacagaatggtccgacctgacaactgccccgaggaactgtaccagctgatgagactgtgctggaaagagaggcccgaggacagacccaccttcgactacctgagaagcgtgctggaagatttcttcaccgccaccgagggccagtaccagcctcagccagggaattcctga

SEQ ID NO: 80 - DNA, 2055 bp, Artificial sequence
  Synthetic polynucleotide
atggctcgctcggtgaccctggtctttctggtgcttgtctcactgaccggtttgtatgctgctgatatccagatgacccagtccccgagctccctgtccgcctctgtgggcgatagggtcaccatcacctgccgtgccagtcaggatgtgaatactgctgtagcctggtatcaacagaaaccaggaaaagctccgaaactactgatttactcggcatccttccttgagtctggagtcccttctcgcttctctggatctagatctgggacggatttcactctgaccatcagcagtctgcagccggaagacttcgcaacttattactgtcagcaacattatactactcctcccacgttcggacagggtaccaaggtggagatcaaagggtctacatctggatctgggaagccgggttctggtgagggttctggtgaggttcagctggtggagtctggcggtggcctggtgcagccagggggctcactccgtttgtcctgtgcagcttctggcttcaacattaaagacacctatatacactgggtgcgtcaggccccgggtaagggcctggaatgggttgcaaggatttatcctacgaatggttatactagatatgccgatagcgtcaagggccgtttcactataagcgcagacacatccaaaaacacagcctacctgcagatgaacagcctgcgtgctgaggacactgccgtctattattgttctagatggggaggggacggcttctatgctatggacgtgtggggtcaaggaaccctggtcaccgtctcctcggcggccgcaatcgaagtgatgtaccctccaccttacctggacaacgagaagtccaacggcaccatcatccacgtgaagggcaagcacctgtgtccttctccactgttccctggacctagcaagcctttctgggtgctcgtggttgttggcggcgtgctggcctgttattctctgctggtcaccgtggccttcatcatcttttgggtcggatcccctaacagcagcgcctctaatgctagcggagctgctgctcctacactgcctgctcacccttctacactgacacaccctcagcggcggatcgatacactgaactctgatggctacacccctgagccagccagaatcacaagccccgacaagcccagacctatgcctatggataccagcgtgtacgagagcccctacagcgaccctgaggaactgaaggacaagaagctgttcctgaagcgggacaacctgctgattgccgacatcgaactcggctgcggcaattttggctctgtcagacagggcgtgtaccggatgcggaagaaacagatcgacgtggccatcaaggtgctgaagcagggaaccgagaaggccgataccgaggaaatgatgcgcgaggcccagatcatgcaccagctggacaatccttacatcgtgcggctgatcggcgtgtgtcaagccgaagctctgatgctggttatggaaatggcaggcggcggacccctgcacaagtttctcgttggcaagagagaggaaatccccgtcagcaacgtggccgaactgctgcaccaagtgtctatgggcatgaagtacctggaagagaagaacttcgtgcaccgcgacctggccgccagaaatgtgctgctggtcaacagacactacgccaagatcagcgacttcggcctgtctaaagccctgggcgccgacgatagctactacacagccagatctgccggaaagtggcccctgaagtggtacgcccctgagtgcatcaacttcagaaagttcagcagccgcagcgacgtgtggtcttacggcgttacaatgtgggaagccctgagctacggccagaaaccttacaagaagatgaagggccccgaagtcatggccttcatcgaacagggcaagagaatggaatgccctcctgagtgccctccagagctgtatgccctgatgagcgactgctggatctataagtgggaagatcggcccgacttcctgaccgtggaacagagaatgagagcctgctactacagcctggggaattcctga

SEQ ID NO: 81 - DNA, 4884 bp, Artificial sequence
  Synthetic polynucleotide
atggctcgctcggtgaccctggtctttctggtgcttgtctcactgaccggtttgtatgctgctgatatccagatgacccagtccccgagctccctgtccgcctctgtgggcgatagggtcaccatcacctgccgtgccagtcaggatgtgaatactgctgtagcctggtatcaacagaaaccaggaaaagctccgaaactactgatttactcggcatccttccttgagtctggagtcccttctcgcttctctggatctagatctgggacggatttcactctgaccatcagcagtctgcagccggaagacttcgcaacttattactgtcagcaacattatactactcctcccacgttcggacagggtaccaaggtggagatcaaagggtctacatctggatctgggaagccgggttctggtgagggttctggtgaggttcagctggtggagtctggcggtggcctggtgcagccagggggctcactccgtttgtcctgtgcagcttctggcttcaacattaaagacacctatatacactgggtgcgtcaggccccgggtaagggcctggaatgggttgcaaggatttatcctacgaatggttatactagatatgccgatagcgtcaagggccgtttcactataagcgcagacacatccaaaaacacagcctacctgcagatgaacagcctgcgtgctgaggacactgccgtctattattgttctagatggggaggggacggcttctatgctatggacgtgtggggtcaaggaaccctggtcaccgtctcctcggcggccgcaatcgaagtgatgtaccctcctccttacctggacaacgagaagtccaacggcaccatcatccacgtgaagggcaagcacctgtgtccttctccactgttccctggacctagcaagcctttctgggtgctcgtggttgttggcggcgtgctggcctgttattctctgctggtcaccgtggccttcatcatcttttgggttggaggcggaggaagcgctggcgctgcttctccttgtgctaatggatgtggacctggcgctccatctgatgccgaagtgctgcacctgtgcagatctctggaagtgggcaccgtgatgaccctgttctacagcaagaagtcccagcggcctgagagaaagaccttccaagtgaagctggaaacccggcagatcacctggtctagaggcgccgataagatcgagggcgccatcgacatcagagagatcaaagagatcagacccggcaagaccagccgggacttcgacagatatcaagaggaccccgccttcagacccgaccagagccactgttttgtgatcctgtacggcatggaatttcggctgaaaacactgagtctgcaggccaccagcgaggacgaagtgaacatgtggatcaagggcctgacctggctgatggaagataccctgcaagcccctacaccactgcagatcgagagatggctgcggaagcagttctactccgtggaccggaacagagaggacagaatcagcgccaaggacctgaagaacatgctgagccaagtgaactacagagtgcccaatatgcggttcctgagagagcggctgacagacctcgaacagagaagcggcgatatcacctacggccagttcgcccagctgtacagatccctgatgtacagcgcccagaaaacaatggacctgcctttcctggaagccagcacactgagagccggcgaaagacctgagctgtgtagagtgtccctgcctgagttccagcagttcctgctggattatcagggcgagctgtgggccgtcgatagactgcaggtccaagagtttatgctgagcttcctgcgggaccctctgagagagatcgaggaaccctacttcttcctggacgaatttgtgaccttcctgttcagcaaagagaacagcgtctggaacagccagctggacgccgtgtgtcccgacaccatgaacaatcctctgagccactactggatcagcagcagccacaatacctacctgaccggcgatcagttcagcagcgagagcagtctggaagcctacgccagatgcctgagaatgggctgcagatgcatcgagctggattgctgggatggccctgatggcatgcctgtgatctaccacggccacacactgaccaccaagatcaagttcagcgacgtgctgcacaccatcaaagaacacgccttcgtggccagcgagtaccccgtgattctgagcatcgaggaccactgctctatcgcccagcagaggaacatggcccagtacttcaagaaggtgctgggagacaccctgctgaccaagcctgtggaaatctctgccgatggcctgccttctccaaaccagctgaagcggaagatcctgatcaagcacaagaagctggccgagggcagcgcctatgaagaggtgccaaccagcatgatgtactccgagaacgacatcagcaacagcatcaagaacggcatcctgtacctggaagatcccgtgaaccacgagtggtatccccactacttcgtgctgaccagctccaagatctactacagcgaggaaaccagcagcgaccagggcaacgaggatgaagaggaacccaaagaggtgtccagcagcaccgagctgcacagcaatgagaagtggtttcacggcaagctcggcgctggcagagatggcagacatattgccgagagactgctgaccgagtactgcattgaaacaggcgcccctgacggcagctttctcgtgcgggaatctgagacattcgtgggcgactacaccctgagcttttggagaaacggcaaggtccagcactgcagaatccacagcagacaggacgccggcacacccaagttctttctgaccgacaacctggtgttcgacagcctgtacgacctgatcacccactaccagcaggtcccactgagatgcaacgagttcgagatgagactgagcgagcccgtgcctcagacaaacgcccacgagagcaaagaatggtatcacgccagcctgacaagagcccaggccgagcacatgctgatgagagttcctagagatggcgccttcctcgtgcggaagagaaacgagcctaacagctacgccatcagcttcagagccgagggaaagattaagcactgccgggtgcagcaagagggccagacagtgatgctgggcaacagcgagttcgattccctggtggatctgatcagctactacgagaagcaccctctctaccggaagatgaagctgagataccccatcaacgaggaagccctggaaaagatcggcaccgccgaacctgattacggcgccctgtatgagggcagaaaccccggcttctacgtggaagctaaccccatgcctaccttcaagtgtgccgtgaaggccctgttcgactacaaggcccaaagagaggacgagctgaccttcatcaagagcgccatcattcagaacgtcgagaagcaagaaggcggctggtggcggggagattatggcggaaagaaacagctgtggttccccagcaactatgtggaagagatggtcaaccccgtggcactggaacccgagagagaacaccttgacgagaacagccctctgggcgatctgctgagaggtgttctggatgtgcctgcctgccagatcgccattagacccgagggcaagaacaaccggctgttcgtgttcagcatctctatggcctctgtggcccattggtcactggatgtggccgccgattctcaagaggaactgcaggactgggtcaagaaaatcagagaggtggcccagaccgccgatgccagactgacagagggcaaaatcatggaacggcggaagaagatcgccctggaactgtctgagctggtggtgtactgcagacccgtgcctttcgacgaagagaagattggcaccgagcgggcctgctacagagacatgagcagctttccagagacaaaggccgagaaatacgtgaacaaggccaagggaaagaagttcctgcagtataaccggctgcagctgagcagaatctaccccaagggccagagactggacagctccaactacgaccctctgcctatgtggatctgtggctctcagctggtggctctgaactttcagacccctgacaagcccatgcagatgaaccaggctctgttcatgaccggcagacactgcggatatgtgctgcagccctccaccatgagagatgaggccttcgatcccttcgacaagagcagcctgagaggcctggaaccttgtgccatcagcattgaggtcctgggcgccagacatctgcctaagaatggcagaggcatcgtgtgccccttcgtggaaattgaagtggctggcgccgagtacgacagcaccaagcagaaaaccgagttcgtggtggacaacggactgaaccctgtgtggcctgccaagccattccacttccaaatcagcaaccccgagttcgccttcctgagattcgtggtgtacgaagaggacatgttctccgaccagaacttcctggcacaggccacctttccagtgaagggactgaaaaccggctaccgggccgtgcctctgaaaaacaactactccgaggatctggaactggccagcctgctgatcaagatcgacatcttccccgccaaagaaaacggcgatctgagcccttttagcggcaccagcctcagagagagaggatctgacgcttctggccagctgttccacggtagagccagagagggcagcttcgagagcagataccagcagcctttcgaggacttccggatctctcaagagcacctggccgaccacttcgactctagagaaagaagggcccctcggagaaccagagtgaacggcgacaacagactctga

SEQ ID NO: 82 - DNA, 1743 bp, Artificial sequence
  Synthetic polynucleotide
atgcttctcctggtgacaagccttctgctctgtgagttaccacacccagcattcctcctgatcccagacatccagatgacacagactacatcctccctgtctgcctctctgggagacagagtcaccatcagttgcagggcaagtcaggacattagtaaatatttaaattggtatcagcagaaaccagatggaactgttaaactcctgatctaccatacatcaagattacactcaggagtcccatcaaggttcagtggcagtgggtctggaacagattattctctcaccattagcaacctggagcaagaagatattgccacttacttttgccaacagggtaatacgcttccgtacacgttcggaggggggactaagttggaaataacaggctccacctctggatccggcaagcccggatctggcgagggatccaccaagggcgaggtgaaactgcaggagtcaggacctggcctggtggcgccctcacagagcctgtccgtcacatgcactgtctcaggggtctcattacccgactatggtgtaagctggattcgccagcctccacgaaagggtctggagtggctgggagtaatatggggtagtgaaaccacatactataattcagctctcaaatccagactgaccatcatcaaggacaactccaagagccaagttttcttaaaaatgaacagtctgcaaactgatgacacagccatttactactgtgccaaacattattactacggtggtagctatgctatggactactggggtcaaggaacctcagtcaccgtctcctcagcggccgcaaccacgacgccagcgccgcgaccaccaacaccggcgcccaccatcgcgtcgcagcccctgtccctgcgcccagaggcgtgccggccagcggcggggggcgcagtgcacacgagggggctggacttcgcctgtgatatctacatctgggcgcccttggccgggacttgtggggtccttctcctgtcactggttatcaccctttactgcaaaggatcccactgtcacagactgcctggcagctacgatagcaccagcagcgacagcctgtatcctcggggcatccagttcaagaggcctcatacagttgccccttggcctcctgcctatcctcctgtgacaagctaccctccactgagccaacctgacctgctgcctattcctagatctcctcagcctctcggcggcagccacagaacacctagcagcagaagagatagcgacggcgccaatagcgtggcctcttatgagaatgagggcgcctctggcattagaggcgctcaagctggatggggagtttggggccctagctggacaagactgacacctgtgtctctgcctccagagcctgcctgtgaagatgccgacgaggacgaggatgactatcacaaccctggctacctggtggtgctgcctgatagcacaccagccacatctacagccgctccatctgctccagctctgagcacacctggcatcagagacagcgccttcagcatggaatccatcgacgactacgtgaacgtgccagagtctggcgaatctgccgaagcctctctggacggctcccgggaatatgtgaatgtgtcccaagaactgcaccctggcgccgctaaaacagaacctgctgctctgtctagccaagaggccgaggaagtggaagaagaaggcgcccctgactacgagaacctgcaagagctgaacgggaattcctga

SEQ ID NO: 83 - DNA, 2640 bp, Artificial sequence
  Synthetic polynucleotide
atggctcgctcggtgaccctggtctttctggtgcttgtctcactgaccggtttgtatgctgctgatatccagatgacccagtccccgagctccctgtccgcctctgtgggcgatagggtcaccatcacctgccgtgccagtcaggatgtgaatactgctgtagcctggtatcaacagaaaccaggaaaagctccgaaactactgatttactcggcatccttccttgagtctggagtcccttctcgcttctctggatctagatctgggacggatttcactctgaccatcagcagtctgcagccggaagacttcgcaacttattactgtcagcaacattatactactcctcccacgttcggacagggtaccaaggtggagatcaaagggtctacatctggatctgggaagccgggttctggtgagggttctggtgaggttcagctggtggagtctggcggtggcctggtgcagccagggggctcactccgtttgtcctgtgcagcttctggcttcaacattaaagacacctatatacactgggtgcgtcaggccccgggtaagggcctggaatgggttgcaaggatttatcctacgaatggttatactagatatgccgatagcgtcaagggccgtttcactataagcgcagacacatccaaaaacacagcctacctgcagatgaacagcctgcgtgctgaggacactgccgtctattattgttctagatggggaggggacggcttctatgctatggacgtgtggggtcaaggaaccctggtcaccgtctcctcggcggccgcaaccacgacgccagcgccgcgaccaccaacaccggcgcccaccatcgcgtcgcagcccctgtccctgcgcccagaggcgtgccggccagcggcggggggcgcagtgcacacgagggggctggacttcgcctgtgatatctacatctgggcgcccttggccgggacttgtggggtccttctcctgtcactggttatcaccctttactgcaaaggatccggcggtggtggatctgctctgagaaacgtgcccttcagatccgaggttctcggctgggaccctgatagcctggccgactacttcaagaagctgaactacaaggactgcgagaaggccgtgaagaagtaccatatcgacggcgccagattcctgaacctgaccgagaacgacatccagaagttccccaagctgagagtgcccatcctgagcaagctgagccaagagatcaacaagaacgaggaacggcggagcatcttcaccagaaagccccaggtgccaagattccccgaggaaacagagagccacgaggaagataacggcggctggtccagcttcgaagaggacgactacgagagccccaacgacgatcaggatggcgaggatgatggcgattacgagtcccctaacgaagaggaagaggcccctgttgaggacgacgccgattatgagcctcctcctagcaacgacgaagaagccctgcagaacagcatcctgcctgccaagccttttccaaacagcaacagcatgtacatcgaccggcctccaagcggcaaaacacctcagcaacctccagttcctcctcagcgacctatggctgcattgcctcctccaccagccggaagaaatcactctccactgcctccacctcagaccaatcacgaggaacccagcagaagcagaaaccacaagaccgccaagctgcccgctccatccatcgatagaagcaccaagcctccactggacagatctctggcccctttcgatagagagcccttcacactgggcaagaagcctccattcagcgacaagcctagcatccctgctggaagaagcctgggcgagcatctgcctaagatccagaaacctcctctgccacctaccaccgagagacacgagagatctagccctctgcctggcaagaaaccacctgtgcctaaacacggctggggcccagacagaagggaaaacgacgaggacgatgtgcaccagaggccattgcctcaacctgctctgctgcccatgtccagcaacacattccccagcaggtccaccaaaccttctccaatgaatcccctgcctagcagccacatgcctggcgcctttagcgagagcaatagcagctttcctcagagcgccagcctgcctccttactttagccagggacctagcaaccggccacctatcagagccgagggcagaaattttcccctgccactgcctaacaagcccagacctccatctcctgccgaggaagagaacagcctgaacgaagagtggtacgtgtcctacatcaccagacctgaagccgaggctgccctgagaaagatcaaccaggatggcacctttctcgtgcgggacagcagcaaaaagaccaccaccaatccttacgtgctgatggtgctgtacaaggacaaggtgtacaacatccagatccgctaccagaaagaaagccaggtgtacctgctcggcaccggcctgagaggcaaagaggattttctgagcgtcagcgacatcatcgactactttagaaagatgcccctgctgctgatcgacggcaagaacagaggcagcagataccagtgcacactgacacacgctgccggctatcccgggaattcctga

SEQ ID NO: 84 - DNA, 1731 bp, Artificial sequence
  Synthetic polynucleotide
atgcttctcctggtgacaagccttctgctctgtgagttaccacacccagcattcctcctgatcccagacatccagatgacacagactacatcctccctgtctgcctctctgggagacagagtcaccatcagttgcagggcaagtcaggacattagtaaatatttaaattggtatcagcagaaaccagatggaactgttaaactcctgatctaccatacatcaagattacactcaggagtcccatcaaggttcagtggcagtgggtctggaacagattattctctcaccattagcaacctggagcaagaagatattgccacttacttttgccaacagggtaatacgcttccgtacacgttcggaggggggactaagttggaaataacaggctccacctctggatccggcaagcccggatctggcgagggatccaccaagggcgaggtgaaactgcaggagtcaggacctggcctggtggcgccctcacagagcctgtccgtcacatgcactgtctcaggggtctcattacccgactatggtgtaagctggattcgccagcctccacgaaagggtctggagtggctgggagtaatatggggtagtgaaaccacatactataattcagctctcaaatccagactgaccatcatcaaggacaactccaagagccaagttttcttaaaaatgaacagtctgcaaactgatgacacagccatttactactgtgccaaacattattactacggtggtagctatgctatggactactggggtcaaggaacctcagtcaccgtctcctcagcggccgcaatcgaagtgatgtaccctccaccttacctggacaacgagaagtccaacggcaccatcatccacgtgaagggcaagcacctgtgtccttctccactgttccctggacctagcaagcctttctgggtgctcgtggttgttggcggcgtgctggcctgttattctctgctggtcaccgtggccttcatcatcttttgggtcggatcccactgtcacagactgcctggcagctacgatagcaccagcagcgacagcctgtatcctcggggcatccagttcaagaggcctcatacagttgccccttggcctcctgcctatcctcctgtgacaagctaccctccactgagccaacctgacctgctgcctattcctagatctcctcagcctctcggcggcagccacagaacacctagcagcagaagagatagcgacggcgccaatagcgtggcctcttatgagaatgagggcgcctctggcattagaggcgctcaagctggatggggagtttggggccctagctggacaagactgacacctgtgtctctgcctccagagcctgcctgtgaagatgccgacgaggacgaggatgactatcacaaccctggcttcctggtggtgctgcctgatagcacaccagccacatctacagccgctccatctgctccagctctgagcacacctggcatcagagacagcgccttcagcatggaatccatcgacgactacgtgaacgtgccagagtctggcgaatctgccgaagcctctctggacggctcccgggaatatgtgaatgtgtcccaagaactgcaccctggcgccgctaaaacagaacctgctgctctgtctagccaagaggccgaggaagtggaagaagaaggcgcccctgactacgagaacctgcaagagctgaacgggaattcctga

SEQ ID NO: 85 - DNA, 1731 bp, Artificial sequence
  Synthetic polynucleotide
atgcttctcctggtgacaagccttctgctctgtgagttaccacacccagcattcctcctgatcccagacatccagatgacacagactacatcctccctgtctgcctctctgggagacagagtcaccatcagttgcagggcaagtcaggacattagtaaatatttaaattggtatcagcagaaaccagatggaactgttaaactcctgatctaccatacatcaagattacactcaggagtcccatcaaggttcagtggcagtgggtctggaacagattattctctcaccattagcaacctggagcaagaagatattgccacttacttttgccaacagggtaatacgcttccgtacacgttcggaggggggactaagttggaaataacaggctccacctctggatccggcaagcccggatctggcgagggatccaccaagggcgaggtgaaactgcaggagtcaggacctggcctggtggcgccctcacagagcctgtccgtcacatgcactgtctcaggggtctcattacccgactatggtgtaagctggattcgccagcctccacgaaagggtctggagtggctgggagtaatatggggtagtgaaaccacatactataattcagctctcaaatccagactgaccatcatcaaggacaactccaagagccaagttttcttaaaaatgaacagtctgcaaactgatgacacagccatttactactgtgccaaacattattactacggtggtagctatgctatggactactggggtcaaggaacctcagtcaccgtctcctcagcggccgcaatcgaagtgatgtaccctccaccttacctggacaacgagaagtccaacggcaccatcatccacgtgaagggcaagcacctgtgtccttctccactgttccctggacctagcaagcctttctgggtgctcgtggttgttggcggcgtgctggcctgttattctctgctggtcaccgtggccttcatcatcttttgggtcggatcccactgtcacagactgcctggcagctacgatagcaccagcagcgacagcctgtatcctcggggcatccagttcaagaggcctcatacagttgccccttggcctcctgcctatcctcctgtgacaagctaccctccactgagccaacctgacctgctgcctattcctagatctcctcagcctctcggcggcagccacagaacacctagcagcagaagagatagcgacggcgccaatagcgtggcctcttatgagaatgagggcgcctctggcattagaggcgctcaagctggatggggagtttggggccctagctggacaagactgacacctgtgtctctgcctccagagcctgcctgtgaagatgccgacgaggacgaggatgactatcacaaccctggctacctggtggtgctgcctgatagcacaccagccacatctacagccgctccatctgctccagctctgagcacacctggcatcagagacagcgccttcagcatggaatccatcgacgacttcgtgaacgtgccagagtctggcgaatctgccgaagcctctctggacggctcccgggaatatgtgaatgtgtcccaagaactgcaccctggcgccgctaaaacagaacctgctgctctgtctagccaagaggccgaggaagtggaagaagaaggcgcccctgactacgagaacctgcaagagctgaacgggaattcctga

SEQ ID NO: 86 - DNA, 1635 bp, Artificial sequence
  Synthetic polynucleotide
atgcttctcctggtgacaagccttctgctctgtgagttaccacacccagcattcctcctgatcccagacatccagatgacacagactacatcctccctgtctgcctctctgggagacagagtcaccatcagttgcagggcaagtcaggacattagtaaatatttaaattggtatcagcagaaaccagatggaactgttaaactcctgatctaccatacatcaagattacactcaggagtcccatcaaggttcagtggcagtgggtctggaacagattattctctcaccattagcaacctggagcaagaagatattgccacttacttttgccaacagggtaatacgcttccgtacacgttcggaggggggactaagttggaaataacaggctccacctctggatccggcaagcccggatctggcgagggatccaccaagggcgaggtgaaactgcaggagtcaggacctggcctggtggcgccctcacagagcctgtccgtcacatgcactgtctcaggggtctcattacccgactatggtgtaagctggattcgccagcctccacgaaagggtctggagtggctgggagtaatatggggtagtgaaaccacatactataattcagctctcaaatccagactgaccatcatcaaggacaactccaagagccaagttttcttaaaaatgaacagtctgcaaactgatgacacagccatttactactgtgccaaacattattactacggtggtagctatgctatggactactggggtcaaggaacctcagtcaccgtctcctcagcggccgcagaatccaaatacggaccaccgtgccctccttgtcctatggcgctcatagtcctcggtggcgtagccggacttttgctgtttataggcttggggatcttctttggatcccactgtcacagactgcctggcagctacgatagcaccagcagcgacagcctgtatcctcggggcatccagttcaagaggcctcatacagttgccccttggcctcctgcctatcctcctgtgacaagctaccctccactgagccaacctgacctgctgcctattcctagatctcctcagcctctcggcggcagccacagaacacctagcagcagaagagatagcgacggcgccaatagcgtggcctcttatgagaatgagggcgcctctggcattagaggcgctcaagctggatggggagtttggggccctagctggacaagactgacacctgtgtctctgcctccagagcctgcctgtgaagatgccgacgaggacgaggatgactatcacaaccctgactacctggtggtgctgcctgatagcacaccagccacatctacagccgctccatctgctccagctctgagcacacctggcatcagagacagcgccttcagcatggaatccatcgacgactacgtgaacgtgccagagtctggcgaatctgccgaagcctctctggacggctcccgggaatatgtgaatgtgtcccaagaactgcaccctggcgccgctaaaacagaacctgctgctctgtctagccaagaggccgaggaagtggaagaagaaggcgcccctgactacgagaacctgcaagagctgaacgggaattcctga

SEQ ID NO: 87 - DNA, 1722 bp, Artificial sequence
  Synthetic polynucleotide
atgcttctcctggtgacaagccttctgctctgtgagttaccacacccagcattcctcctgatcccagacatccagatgacacagactacatcctccctgtctgcctctctgggagacagagtcaccatcagttgcagggcaagtcaggacattagtaaatatttaaattggtatcagcagaaaccagatggaactgttaaactcctgatctaccatacatcaagattacactcaggagtcccatcaaggttcagtggcagtgggtctggaacagattattctctcaccattagcaacctggagcaagaagatattgccacttacttttgccaacagggtaatacgcttccgtacacgttcggaggggggactaagttggaaataacaggctccacctctggatccggcaagcccggatctggcgagggatccaccaagggcgaggtgaaactgcaggagtcaggacctggcctggtggcgccctcacagagcctgtccgtcacatgcactgtctcaggggtctcattacccgactatggtgtaagctggattcgccagcctccacgaaagggtctggagtggctgggagtaatatggggtagtgaaaccacatactataattcagctctcaaatccagactgaccatcatcaaggacaactccaagagccaagttttcttaaaaatgaacagtctgcaaactgatgacacagccatttactactgtgccaaacattattactacggtggtagctatgctatggactactggggtcaaggaacctcagtcaccgtctcctcagcggccgcagcaatggacaccgggctttacatatgcaaggtggagcttatgtatccaccaccatattacctcggtataggtaacggtacgcaaatttatgtgatcgaccctgaaccttgccccgacagtgacatggcgctcatagtcctcggtggcgtagccggacttttgctgtttataggcttggggatcttctttggatcccactgtcacagactgcctggcagctacgatagcaccagcagcgacagcctgtatcctcggggcatccagttcaagaggcctcatacagttgccccttggcctcctgcctatcctcctgtgacaagctaccctccactgagccaacctgacctgctgcctattcctagatctcctcagcctctcggcggcagccacagaacacctagcagcagaagagatagcgacggcgccaatagcgtggcctcttatgagaatgagggcgcctctggcattagaggcgctcaagctggatggggagtttggggccctagctggacaagactgacacctgtgtctctgcctccagagcctgcctgtgaagatgccgacgaggacgaggatgactatcacaaccctggctacctggtggtgctgcctgatagcacaccagccacatctacagccgctccatctgctccagctctgagcacacctggcatcagagacagcgccttcagcatggaatccatcgacgactacgtgaacgtgccagagtctggcgaatctgccgaagcctctctggacggctcccgggaatatgtgaatgtgtcccaagaactgcaccctggcgccgctaaaacagaacctgctgctctgtctagccaagaggccgaggaagtggaagaagaaggcgcccctgactacgagaacctgcaagagctgaacgggaattcctga

SEQ ID NO: 88 - DNA, 1635 bp, Artificial sequence
  Synthetic polynucleotide
atgcttctcctggtgacaagccttctgctctgtgagttaccacacccagcattcctcctgatcccagacatccagatgacacagactacatcctccctgtctgcctctctgggagacagagtcaccatcagttgcagggcaagtcaggacattagtaaatatttaaattggtatcagcagaaaccagatggaactgttaaactcctgatctaccatacatcaagattacactcaggagtcccatcaaggttcagtggcagtgggtctggaacagattattctctcaccattagcaacctggagcaagaagatattgccacttacttttgccaacagggtaatacgcttccgtacacgttcggaggggggactaagttggaaataacaggctccacctctggatccggcaagcccggatctggcgagggatccaccaagggcgaggtgaaactgcaggagtcaggacctggcctggtggcgccctcacagagcctgtccgtcacatgcactgtctcaggggtctcattacccgactatggtgtaagctggattcgccagcctccacgaaagggtctggagtggctgggagtaatatggggtagtgaaaccacatactataattcagctctcaaatccagactgaccatcatcaaggacaactccaagagccaagttttcttaaaaatgaacagtctgcaaactgatgacacagccatttactactgtgccaaacattattactacggtggtagctatgctatggactactggggtcaaggaacctcagtcaccgtctcctcagcggccgcagaatccaaatacggaccaccgtgccctccttgtcctatggcgctcatagtcctcggtggcgtagccggacttttgctgtttataggcttggggatcttctttggatcccactgtcacagactgcctggcagctacgatagcaccagcagcgacagcctgtatcctcggggcatccagttcaagaggcctcatacagttgccccttggcctcctgcctatcctcctgtgacaagctaccctccactgagccaacctgacctgctgcctattcctagatctcctcagcctctcggcggcagccacagaacacctagcagcagaagagatagcgacggcgccaatagcgtggcctcttatgagaatgagggcgcctctggcattagaggcgctcaagctggatggggagtttggggccctagctggacaagactgacacctgtgtctctgcctccagagcctgcctgtgaagatgccgacgaggacgaggatgactatcacaaccctggctacctggtggtgctgcctgatagcacaccagccacatctacagccgctccatctgctccagctctgagcacacctggcatcagagacagcgccttcagcatggaatccatcgacgactacgtgaacgtgccagagtctggcgaatctgccgaagcctctctggacggctcccgggaatatgtgaatgtgtcccaagaactgcaccctggcgccgctaaaacagaacctgctgctctgtctagccaagaggccgaggaagtggaagaagaaggcgcccctgactacgagaacctgcaagagctgaacgggaattcctga

SEQ ID NO: 89 - DNA, 2628 bp, Artificial sequence
  Synthetic polynucleotide
atggctcgctcggtgaccctggtctttctggtgcttgtctcactgaccggtttgtatgctgctgatatccagatgacccagtccccgagctccctgtccgcctctgtgggcgatagggtcaccatcacctgccgtgccagtcaggatgtgaatactgctgtagcctggtatcaacagaaaccaggaaaagctccgaaactactgatttactcggcatccttccttgagtctggagtcccttctcgcttctctggatctagatctgggacggatttcactctgaccatcagcagtctgcagccggaagacttcgcaacttattactgtcagcaacattatactactcctcccacgttcggacagggtaccaaggtggagatcaaagggtctacatctggatctgggaagccgggttctggtgagggttctggtgaggttcagctggtggagtctggcggtggcctggtgcagccagggggctcactccgtttgtcctgtgcagcttctggcttcaacattaaagacacctatatacactgggtgcgtcaggccccgggtaagggcctggaatgggttgcaaggatttatcctacgaatggttatactagatatgccgatagcgtcaagggccgtttcactataagcgcagacacatccaaaaacacagcctacctgcagatgaacagcctgcgtgctgaggacactgccgtctattattgttctagatggggaggggacggcttctatgctatggacgtgtggggtcaaggaaccctggtcaccgtctcctcggcggccgcaatcgaagtgatgtaccctccaccttacctggacaacgagaagtccaacggcaccatcatccacgtgaagggcaagcacctgtgtccttctccactgttccctggacctagcaagcctttctgggtgctcgtggttgttggcggcgtgctggcctgttattctctgctggtcaccgtggccttcatcatcttttgggtcggatccggcggtggtggatctgctctgagaaacgtgcccttcagatccgaggttctcggctgggaccctgatagcctggccgactacttcaagaagctgaactacagggactgcgagaaggccgtgaagaagtaccatatcgacggcgccagattcctgaacctgaccgagaacgacatccagaagttccccaagctgagagtgcccatcctgagcaagctgagccaagagatcaacaagaacgaggaacggcggagcatcttcaccagaaagccccaggtgccaagattccccgaggaaacagagagccacgaggaagataacggcggctggtccagcttcgaagaggacgactacgagagccccaacgacgatcaggatggcgaggatgatggcgattacgagtcccctaacgaagaggaagaggcccctgttgaggacgacgccgattatgagcctcctcctagcaacgacgaagaagccctgcagaacagcatcctgcctgccaagccttttccaaacagcaacagcatgtacatcgaccggcctccaagcggcaaaacacctcagcaacctccagttcctcctcagcgacctatggctgcattgcctcctccaccagccggaagaaatcactctccactgcctccacctcagaccaatcacgaggaacccagcagaagcagaaaccacaagaccgccaagctgcccgctccatccatcgatagaagcaccaagcctccactggacagatctctggcccctttcgatagagagcccttcacactgggcaagaagcctccattcagcgacaagcctagcatccctgctggaagaagcctgggcgagcatctgcctaagatccagaaacctcctctgccacctaccaccgagagacacgagagatctagccctctgcctggcaagaaaccacctgtgcctaaacacggctggggcccagacagaagggaaaacgacgaggacgatgtgcaccagaggccattgcctcaacctgctctgctgcccatgtccagcaacacattccccagcaggtccaccaaaccttctccaatgaatcccctgcctagcagccacatgcctggcgcctttagcgagagcaatagcagctttcctcagagcgccagcctgcctccttactttagccagggacctagcaaccggccacctatcagagccgagggcagaaattttcccctgccactgcctaacaagcccagacctccatctcctgccgaggaagagaacagcctgaacgaagagtggtacgtgtcctacatcaccagacctgaagccgaggctgccctgagaaagatcaaccaggatggcacctttctcgtgcgggacagcagcaaaaagaccaccaccaatccttacgtgctgatggtgctgtacaaggacaaggtgtacaacatccagatccgctaccagaaagaaagccaggtgtacctgctcggcaccggcctgagaggcaaagaggattttctgagcgtcagcgacatcatcgactactttagaaagatgcccctgctgctgatcgacggcaagaacagaggcagcagataccagtgcacactgacacacgctgccggctatcccgggaattcctga

SEQ ID NO: 90 - DNA, 1287 bp, Artificial sequence
  Synthetic polynucleotide
atggctcgctcggtgaccctggtctttctggtgcttgtctcactgaccggtttgtatgctgctgatatccagatgacccagtccccgagctccctgtccgcctctgtgggcgatagggtcaccatcacctgccgtgccagtcaggatgtgaatactgctgtagcctggtatcaacagaaaccaggaaaagctccgaaactactgatttactcggcatccttccttgagtctggagtcccttctcgcttctctggatctagatctgggacggatttcactctgaccatcagcagtctgcagccggaagacttcgcaacttattactgtcagcaacattatactactcctcccacgttcggacagggtaccaaggtggagatcaaagggtctacatctggatctgggaagccgggttctggtgagggttctggtgaggttcagctggtggagtctggcggtggcctggtgcagccagggggctcactccgtttgtcctgtgcagcttctggcttcaacattaaagacacctatatacactgggtgcgtcaggccccgggtaagggcctggaatgggttgcaaggatttatcctacgaatggttatactagatatgccgatagcgtcaagggccgtttcactataagcgcagacacatccaaaaacacagcctacctgcagatgaacagcctgcgtgctgaggacactgccgtctattattgttctagatggggaggggacggcttctatgctatggacgtgtggggtcaaggaaccctggtcaccgtctcctcggcggccgcaatcgaagtgatgtaccctccaccttacctggacaacgagaagtccaacggcaccatcatccacgtgaagggcaagcacctgtgtccttctccactgttccctggacctagcaagcctttctgggtgctcgtggttgttggcggcgtgctggcctgttattctctgctggtcaccgtggccttcatcatcttttgggtcggatccaagaaacttgtcaagaaattccgacagaaaaagcaaagacaatggattggcccaactggaatgaaccaaaacatgagctttcatagaaatcatactgcgacagttcgctctcatgccgagaatcccacagcgtcacacgttgataacgaatacagccaaccgcctagaaattcacacctgagtgcttatcctgcccttgaaggggcccttcatcggtcttctatgcaaccggataattcttctgactcagactatgatttgcacggcgctcaacgcctgtga

SEQ ID NO: 91 - DNA, 1743 bp, Artificial sequence
  Synthetic polynucleotide
atggctcgctcggtgaccctggtctttctggtgcttgtctcactgaccggtttgtatgctgctgatatccagatgacccagtccccgagctccctgtccgcctctgtgggcgatagggtcaccatcacctgccgtgccagtcaggatgtgaatactgctgtagcctggtatcaacagaaaccaggaaaagctccgaaactactgatttactcggcatccttccttgagtctggagtcccttctcgcttctctggatctagatctgggacggatttcactctgaccatcagcagtctgcagccggaagacttcgcaacttattactgtcagcaacattatactactcctcccacgttcggacagggtaccaaggtggagatcaaagggtctacatctggatctgggaagccgggttctggtgagggttctggtgaggttcagctggtggagtctggcggtggcctggtgcagccagggggctcactccgtttgtcctgtgcagcttctggcttcaacattaaagacacctatatacactgggtgcgtcaggccccgggtaagggcctggaatgggttgcaaggatttatcctacgaatggttatactagatatgccgatagcgtcaagggccgtttcactataagcgcagacacatccaaaaacacagcctacctgcagatgaacagcctgcgtgctgaggacactgccgtctattattgttctagatggggaggggacggcttctatgctatggacgtgtggggtcaaggaaccctggtcaccgtctcctcggcggccgcaatcgaagtgatgtaccctccaccttacctggacaacgagaagtccaacggcaccatcatccacgtgaagggcaagcacctgtgtccttctccactgttccctggacctagcaagcctttctgggtgctcgtggttgttggcggcgtgctggcctgttattctctgctggtcaccgtggccttcatcatcttttgggtcggatccctcaggatcaaagggaagtacgctctccccgttatggttaaccaccaacacctgcctactacaatccccgccggaagtaatagttatcaacccgttcctattacgataccaaaagaggtgttcatgctccctatacaggtccaagcaccacctccagaagactcagactccggctccgattccgattatgaacattatgacttctccgcacagcctccggtggcactcacgactttctacaatagccagaggcaccgggtgacagatgaagaggttcagcagtcacggttccaaatgccgccgctggaggaagggcttgaagagttgcacgcttcacatatccccaccgccaaccccgggcattgcattactgacccaccgtctttgggcccgcaataccatcccaggtcaaattcagaatcatcaacttcaagcggggaggactactgtaacagcccaaagagcaaacttccgccatggaacccacaagtcttctcttcagaacgatcatcttttttggaacaaccacctaatttggaattggctggaacccaaccggctttctctgctgggccgcccgcagatgacagctcctctactagcagcggggaatggtatcagaacttccagcctccacctcagcctccaagtgaagaacagttcgggtgccctggctcacctagtccccagccggacagcacggacaacgatgattacgatgacatcagtgcagcctga

SEQ ID NO: 92 - DNA, 1191 bp, Artificial sequence
  Synthetic polynucleotide
atggctcgctcggtgaccctggtctttctggtgcttgtctcactgaccggtttgtatgctgctgatatccagatgacccagtccccgagctccctgtccgcctctgtgggcgatagggtcaccatcacctgccgtgccagtcaggatgtgaatactgctgtagcctggtatcaacagaaaccaggaaaagctccgaaactactgatttactcggcatccttccttgagtctggagtcccttctcgcttctctggatctagatctgggacggatttcactctgaccatcagcagtctgcagccggaagacttcgcaacttattactgtcagcaacattatactactcctcccacgttcggacagggtaccaaggtggagatcaaagggtctacatctggatctgggaagccgggttctggtgagggttctggtgaggttcagctggtggagtctggcggtggcctggtgcagccagggggctcactccgtttgtcctgtgcagcttctggcttcaacattaaagacacctatatacactgggtgcgtcaggccccgggtaagggcctggaatgggttgcaaggatttatcctacgaatggttatactagatatgccgatagcgtcaagggccgtttcactataagcgcagacacatccaaaaacacagcctacctgcagatgaacagcctgcgtgctgaggacactgccgtctattattgttctagatggggaggggacggcttctatgctatggacgtgtggggtcaaggaaccctggtcaccgtctcctcggcggccgcaatcgaagtgatgtaccctccaccttacctggacaacgagaagtccaacggcaccatcatccacgtgaagggcaagcacctgtgtccttctccactgttccctggacctagcaagcctttctgggtgctcgtggttgttggcggcgtgctggcctgttattctctgctggtcaccgtggccttcatcatcttttgggtcggatccagaaaagagctcaagcggaagaagaagtgggatcttgaaatatcactcgactctgggcacgagaagaaagtcattagctcccttcaggaagaccggcacctggaagaagaactcaagtgccaggaacagaaagaagagcaactccaggagggagtacaccgaaaagaaccccaaggggccacctga

SEQ ID NO: 93 - DNA, 1134 bp, Artificial sequence
  Synthetic polynucleotide
atggctcgctcggtgaccctggtctttctggtgcttgtctcactgaccggtttgtatgctgctgatatccagatgacccagtccccgagctccctgtccgcctctgtgggcgatagggtcaccatcacctgccgtgccagtcaggatgtgaatactgctgtagcctggtatcaacagaaaccaggaaaagctccgaaactactgatttactcggcatccttccttgagtctggagtcccttctcgcttctctggatctagatctgggacggatttcactctgaccatcagcagtctgcagccggaagacttcgcaacttattactgtcagcaacattatactactcctcccacgttcggacagggtaccaaggtggagatcaaagggtctacatctggatctgggaagccgggttctggtgagggttctggtgaggttcagctggtggagtctggcggtggcctggtgcagccagggggctcactccgtttgtcctgtgcagcttctggcttcaacattaaagacacctatatacactgggtgcgtcaggccccgggtaagggcctggaatgggttgcaaggatttatcctacgaatggttatactagatatgccgatagcgtcaagggccgtttcactataagcgcagacacatccaaaaacacagcctacctgcagatgaacagcctgcgtgctgaggacactgccgtctattattgttctagatggggaggggacggcttctatgctatggacgtgtggggtcaaggaaccctggtcaccgtctcctcggcggccgcaatcgaagtgatgtaccctccaccttacctggacaacgagaagtccaacggcaccatcatccacgtgaagggcaagcacctgtgtccttctccactgttccctggacctagcaagcctttctgggtgctcgtggttgttggcggcgtgctggcctgttattctctgctggtcaccgtggccttcatcatcttttgggtcggatccaagcggggcagaaagaagctgctgtacatcttcaagcagcccttcatgcggcccgtgcagaccacacaagaggaagatggctgctcctgcagattccccgaggaagaagaaggcggctgcgagctgtga

SEQ ID NO: 94 - DNA, 1125 bp, Artificial sequence
  Synthetic polynucleotide
atggctcgctcggtgaccctggtctttctggtgcttgtctcactgaccggtttgtatgctgctgatatccagatgacccagtccccgagctccctgtccgcctctgtgggcgatagggtcaccatcacctgccgtgccagtcaggatgtgaatactgctgtagcctggtatcaacagaaaccaggaaaagctccgaaactactgatttactcggcatccttccttgagtctggagtcccttctcgcttctctggatctagatctgggacggatttcactctgaccatcagcagtctgcagccggaagacttcgcaacttattactgtcagcaacattatactactcctcccacgttcggacagggtaccaaggtggagatcaaagggtctacatctggatctgggaagccgggttctggtgagggttctggtgaggttcagctggtggagtctggcggtggcctggtgcagccagggggctcactccgtttgtcctgtgcagcttctggcttcaacattaaagacacctatatacactgggtgcgtcaggccccgggtaagggcctggaatgggttgcaaggatttatcctacgaatggttatactagatatgccgatagcgtcaagggccgtttcactataagcgcagacacatccaaaaacacagcctacctgcagatgaacagcctgcgtgctgaggacactgccgtctattattgttctagatggggaggggacggcttctatgctatggacgtgtggggtcaaggaaccctggtcaccgtctcctcggcggccgcaattgaagttatgtatcctcctccttacctagacaatgagaagagcaatggaaccattatccatgtgaaagggaaacacctttgtccaagtcccctatttcccggaccttctaagcccttttgggtgctggtggtggttgggggagtcctggcttgctatagcttgctagtaacagtggcctttattattttctgggtgaggagtaagaggagcaggctcctgcacagtgactacatgaacatgactccccgccgccccgggcccacccgcaagcattaccagccctatgccccaccacgcgacttcgcagcctatcgctcctga

SEQ ID NO: 95 - DNA, 1350 bp, Artificial sequence
  Synthetic polynucleotide
atggctcgctcggtgaccctggtctttctggtgcttgtctcactgaccggtttgtatgctgctgatatccagatgacccagtccccgagctccctgtccgcctctgtgggcgatagggtcaccatcacctgccgtgccagtcaggatgtgaatactgctgtagcctggtatcaacagaaaccaggaaaagctccgaaactactgatttactcggcatccttccttgagtctggagtcccttctcgcttctctggatctagatctgggacggatttcactctgaccatcagcagtctgcagccggaagacttcgcaacttattactgtcagcaacattatactactcctcccacgttcggacagggtaccaaggtggagatcaaagggtctacatctggatctgggaagccgggttctggtgagggttctggtgaggttcagctggtggagtctggcggtggcctggtgcagccagggggctcactccgtttgtcctgtgcagcttctggcttcaacattaaagacacctatatacactgggtgcgtcaggccccgggtaagggcctggaatgggttgcaaggatttatcctacgaatggttatactagatatgccgatagcgtcaagggccgtttcactataagcgcagacacatccaaaaacacagcctacctgcagatgaacagcctgcgtgctgaggacactgccgtctattattgttctagatggggaggggacggcttctatgctatggacgtgtggggtcaaggaaccctggtcaccgtctcctcggcggccgccattgaggtcatgtacccaccaccttacctcgacaacgaaaaatcaaacgggacgattattcacgtcaaaggcaagcatctgtgcccgtcacctctgttccccggaccaagcaaaccgttctgggtgcttgttgtcgtcggcggggtccttgcttgttactcacttctggttaccgttgcttttatcattttttgggtgaagcggaagaagcagcggagcagacggaacgacgaggaactggaaacaagagcccacagagtggccaccgaggaaagaggcagaaagccccaccagattccagcctccacacctcagaatcccgccacatctcaacaccctccacctccacctggacacagatctcaggccccatctcatagaccaccacctccaggacacagagtgcagcaccagcctcagaaaagacctcctgcacctagcggaacacaggtgcaccagcaaaaaggccctccactgcctagacctagggtgcagcctaaacctcctcatggcgccgctgagaatagcctgtctcctagcagcaactaa

SEQ ID NO: 96 - DNA, 2805 bp, Artificial sequence
  Synthetic polynucleotide
atggaattcggcctgagctggctgttcctggtggccatcctgaagggcgtgcagtgcagcagagacatcctgctgacccagacccctctgagcctgcctgtgtctctgggcgatcaggccagcatcagctgcagatccagccagagcctggtgcaccggaacggcaacacctacctgcactggtatctgcagaagcccggccagagccccaagctgctgatccacaaggtgtccaaccggttcagcggcgtgcccgacagattttctggcagcggctccggcaccgacttcaccctgaagatcagccgggtggaagccgaggacctgggcgtgtacttctgcagccagtccacccacgtgccccccctgacatttggcgccggaacaaagctggaactgaaggggggaggcggatctggcggcggaggaagtggcggagggggatctgaagtgaagctgcagcagtccggccccagcctggtggaacctggcgcctctgtgatgatctcctgcaaggccagcggcagctccttcaccggctacaacatgaactgggtgcgccagaacatcggcaagagcctggaatggatcggcgccatcgacccctactacggcggcaccagctacaaccagaagttcaagggcagagccaccctgaccgtggacaagagcagcagcaccgcctacatgcacctgaagtccctgaccagcgaggacagcgccgtgtactactgcgtgtccggcatgaagtactggggccagggcacaagcgtgaccgtgtctagcgccaagaccaccccccctagcgtgtacggaagagtgacagtgtcctctgccgagcccaagagctgcgacaagacccacacctgtcccccttgtcctgcccctcctgttgcaggcccttccgtgttcctgttccccccaaagcccaaggacacactgatgatcagcagaacccccgaagtgacctgcgtggtggtggacgtgtcccacgaggacccagaagtgaagttcaattggtacgtggacggcgtggaagtgcacaacgccaagacaaagcccagagaggaacagtaccaaagcacctaccgggtggtgtccgtgctgaccgtgctgcatcaggattggctgaacggcaaagagtacaagtgcaaagtgtccaacaaggccctgcctgcccccatcgagaaaaccatcagcaaggccaagggccagccccgcgaaccccaggtgtacacactgccccctagcagggacgagctgaccaagaaccaggtgtccctgacatgcctcgtgaagggcttctacccctccgatatcgccgtggaatgggagagcaacggccagcccgagaacaactacaagacaacccctcccgtgctggacagcgacggctcattcttcctgtacagcaagctgacagtggataagtcccggtggcagcagggcaacgtgttcagctgctccgtgatgcacgaggccctgcacaaccactacacccagaaaagcctgtccctgagccccggcaagaaggaccccaaagcggccgcaatcgaagtgatgtaccctccaccttacctggacaacgagaagtccaacggcaccatcatccacgtgaagggcaagcacctgtgtccttctccactgttccctggacctagcaagcctttctgggtgctcgtggttgttggcggcgtgctggcctgttattctctgctggtcaccgtggccttcatcatcttttgggtcggatcccctaacagcagcgcctctaatgctagcggagctgctgctcctacactgcctgctcacccttctacactgacacaccctcagcggcggatcgatacactgaactctgatggctacacccctgagccagccagaatcacaagccccgacaagcccagacctatgcctatggataccagcgtgtacgagagcccctacagcgaccctgaggaactgaaggacaagaagctgttcctgaagcgggacaacctgctgattgccgacatcgaactcggctgcggcaattttggctctgtcagacagggcgtgtaccggatgcggaagaaacagatcgacgtggccatcaaggtgctgaagcagggaaccgagaaggccgataccgaggaaatgatgcgcgaggcccagatcatgcaccagctggacaatccttacatcgtgcggctgatcggcgtgtgtcaagccgaagctctgatgctggttatggaaatggcaggcggcggacccctgcacaagtttctcgttggcaagagagaggaaatccccgtcagcaacgtggccgaactgctgcaccaagtgtctatgggcatgaagtacctggaagagaagaacttcgtgcaccgcgacctggccgccagaaatgtgctgctggtcaacagacactacgccaagatcagcgacttcggcctgtctaaagccctgggcgccgacgatagctactacacagccagatctgccggaaagtggcccctgaagtggtacgcccctgagtgcatcaacttcagaaagttcagcagccgcagcgacgtgtggtcttacggcgttacaatgtgggaagccctgagctacggccagaaaccttacaagaagatgaagggccccgaagtcatggccttcatcgaacagggcaagagaatggaatgccctcctgagtgccctccagagctgtatgccctgatgagcgactgctggatctataagtgggaagatcggcccgacttcctgaccgtggaacagagaatgagagcctgctactacagcctggggaattcctga

SEQ ID NO: 97 - DNA, 2073 bp, Artificial sequence
  Synthetic polynucleotide
atggttgccaccctgctcgtgacaagcctgctgctgtgcgagctgccccaccctgcctttctgctgatccccgataccgaggtgcagctggtggaatctggcggcggactggtgcagcctggcggatctctgagactgagctgtgccgccagcggcttcaccttcagcagcttcggaatgcactgggtgcgccaggcccctggcaaaggactggaatgggtggcctacatcagcagcgacagcagcgccatctactacgccgacaccgtgaagggccggttcaccatctcccgggacaacgccaagaacagcctgtacctgcagatgaactccctgcgggacgaggacaccgccgtgtactattgcggcagaggcagagagaacatctattacggcagcagactggactactggggccagggcacaaccgtgacagtgtctagcggaggcggaggatcaggcggcggaggaagtggcggagggggatctgatatccagctgacccagagccccagcttcctgagcgcctctgtgggcgacagagtgaccatcacatgcaaggccagccagaacgtggacaccaacgtggcctggtatcagcagaagcccggcaaggcccctaaggccctgatctacagcgccagctaccggtacagcggcgtgcccagcagattttctggcagcggctccggcaccgacttcaccctgacaatcagcagcctgcagcccgaggacttcgccacctactactgccagcagtacaacaactaccctttcaccttcggccaggggaccaagctggaaatcaaagcggccgcaatcgaagtgatgtaccctccaccttacctggacaacgagaagtccaacggcaccatcatccacgtgaagggcaagcacctgtgtccttctccactgttccctggacctagcaagcctttctgggtgctcgtggttgttggcggcgtgctggcctgttattctctgctggtcaccgtggccttcatcatcttttgggtcggatcccctaacagcagcgcctctaatgctagcggagctgctgctcctacactgcctgctcacccttctacactgacacaccctcagcggcggatcgatacactgaactctgatggctacacccctgagccagccagaatcacaagccccgacaagcccagacctatgcctatggataccagcgtgtacgagagcccctacagcgaccctgaggaactgaaggacaagaagctgttcctgaagcgggacaacctgctgattgccgacatcgaactcggctgcggcaattttggctctgtcagacagggcgtgtaccggatgcggaagaaacagatcgacgtggccatcaaggtgctgaagcagggaaccgagaaggccgataccgaggaaatgatgcgcgaggcccagatcatgcaccagctggacaatccttacatcgtgcggctgatcggcgtgtgtcaagccgaagctctgatgctggttatggaaatggcaggcggcggacccctgcacaagtttctcgttggcaagagagaggaaatccccgtcagcaacgtggccgaactgctgcaccaagtgtctatgggcatgaagtacctggaagagaagaacttcgtgcaccgcgacctggccgccagaaatgtgctgctggtcaacagacactacgccaagatcagcgacttcggcctgtctaaagccctgggcgccgacgatagctactacacagccagatctgccggaaagtggcccctgaagtggtacgcccctgagtgcatcaacttcagaaagttcagcagccgcagcgacgtgtggtcttacggcgttacaatgtgggaagccctgagctacggccagaaaccttacaagaagatgaagggccccgaagtcatggccttcatcgaacagggcaagagaatggaatgccctcctgagtgccctccagagctgtatgccctgatgagcgactgctggatctataagtgggaagatcggcccgacttcctgaccgtggaacagagaatgagagcctgctactacagcctggggaattcctga

SEQ ID NO: 98 - DNA, 1716 bp, Artificial sequence
  Synthetic polynucleotide
atgcttctgctcgtgacaagcctgctgctgtgcgagctgccccaccctgcctttctgctgatccctcaggtgcagctgcagcagtctggccctggcctcgtgaagcctagccagaccctgagcctgacctgtgccatcagcggcgatagcgtgtccagcaatagcgccgcctggaactggatcagacagagccctagcagaggcctggaatggctgggccggacctactaccggtccaagtggtacaacgactacgccgtgtccgtgaagtcccggatcaccatcaaccccgacaccagcaagaaccagttctccctgcagctgaacagcgtgacccccgaggataccgccgtgtactactgcgccagagaagtgaccggcgacctggaagatgccttcgacatctggggccagggcacaatggtcaccgtgtctagcggaggcggcggaagcgacatccagatgacacagagccccagctccctgagcgccagcgtgggagacagagtgaccatcacctgtcgggccagccagaccatctggtcctacctgaactggtatcagcagcggcctggcaaggcccccaacctgctgatctatgccgccagctcactgcagagcggcgtgcccagcagattttccggcagaggcagcggcaccgacttcaccctgacaatcagttccctgcaggccgaggacttcgccacctactactgccagcagagctacagcatcccccagaccttcggccaggggaccaagctggaaatcaaagcggccgcaaccacgacgccagcgccgcgaccaccaacaccggcgcccaccatcgcgtcgcagcccctgtccctgcgcccagaggcgtgccggccagcggcggggggcgcagtgcacacgagggggctggacttcgcctgtgatatctacatctgggcgcccttggccgggacttgtggggtccttctcctgtcactggttatcaccctttactgcaaaggatcccactgtcacagactgcctggcagctacgatagcaccagcagcgacagcctgtatcctcggggcatccagttcaagaggcctcatacagttgccccttggcctcctgcctatcctcctgtgacaagctaccctccactgagccaacctgacctgctgcctattcctagatctcctcagcctctcggcggcagccacagaacacctagcagcagaagagatagcgacggcgccaatagcgtggcctcttatgagaatgagggcgcctctggcattagaggcgctcaagctggatggggagtttggggccctagctggacaagactgacacctgtgtctctgcctccagagcctgcctgtgaagatgccgacgaggacgaggatgactatcacaaccctggctacctggtggtgctgcctgatagcacaccagccacatctacagccgctccatctgctccagctctgagcacacctggcatcagagacagcgccttcagcatggaatccatcgacgactacgtgaacgtgccagagtctggcgaatctgccgaagcctctctggacggctcccgggaatatgtgaatgtgtcccaagaactgcaccctggcgccgctaaaacagaacctgctgctctgtctagccaagaggccgaggaagtggaagaagaaggcgcccctgactacgagaacctgcaagagctgaacgggaattcctga

SEQ ID NO: 99 - DNA, 207 bp, Artificial sequence
  Synthetic polynucleotide
gcggccgcaatcgaagtgatgtaccctcctccttacctggacaacgagaagtccaacggcaccatcatccacgtgaagggcaagcacctgtgtccttctccactgttccctggacctagcaagcctttctgggtgctcgtggttgttggcggcgtgctggcctgttattctctgctggtcaccgtggccttcatcatcttttgggtt

SEQ ID NO: 100 - DNA, 207 bp, Artificial sequence
  Synthetic polynucleotide
gcggccgcaattgaagttatgtatcctcctccttacctagacaatgagaagagcaatggaaccattatccatgtgaaagggaaacacctttgtccaagtcccctatttcccggaccttctaagcccttttgggtgctggtggtggttgggggagtcctggcttgctatagcttgctagtaacagtggcctttattattttctgggtg

SEQ ID NO: 101 - DNA, 207 bp, Artificial sequence
  Synthetic polynucleotide
gcggccgccattgaggtcatgtacccaccaccttacctcgacaacgaaaaatcaaacgggacgattattcacgtcaaaggcaagcatctgtgcccgtcacctctgttccccggaccaagcaaaccgttctgggtgcttgttgtcgtcggcggggtccttgcttgttactcacttctggttaccgttgcttttatcattttttgggtg

SEQ ID NO: 102 - protein, 69 aa, Artificial sequence
  Synthetic polypeptide
AAAIEVMYPPPYLDNEKSNGTIIHVKGKHLAPSPLFPGPSKPFWVLVVVGGVLAAYSLLVTVAFIIFWV

SEQ ID NO: 103 - protein, 240 aa, Artificial sequence
  Synthetic polypeptide
GSHCHRLPGSYDSTSSDSLYPRGIQFKRPHTVAPWPPAYPPVTSYPPLSQPDLLPIPRSPQPLGGSHRTPSSRRDSDGANSVASYENEGASGIRGAQAGWGVWGPSWTRLTPVSLPPEPACEDADEDEDDYHNPGYLVVLPDSTPATSTAAPSAPALSTPGIRDSAFSMESIDDFVNVPESGESAEASLDGSREFVNVSQELHPGAAKTEPAALSSQEAEEVEEEGAPDYENLQELNGNS

SEQ ID NO: 104 - protein, 174 aa, Artificial sequence
  Synthetic polypeptide
GSHCHRLPGSYDSTSSDSLYPRGIQFKRPHTVAPWPPAYPPVTSYPPLSQPDLLPIPRSPQPLGGSHRTPSSRRDSDGANSVASYENEGASGIRGAQAGWGVWGPSWTRLTPVSLPPEPACEDADEDEDDYHNPGYLVVLPDSTPATSTAAPSAPALSTPGIRDSAFSMESIDD

SEQ ID NO: 105 - protein, 240 aa, Artificial sequence
  Synthetic polypeptide
GSHCHRLPGSYDSTSSDSLYPRGIQFKRPHTVAPWPPAYPPVTSYPPLSQPDLLPIPRSPQPLGGSHRTPSSRRDSDGANSVASYENEGASGIRGAQAGWGVWGPSWTRLTPVSLPPEPACEDADEDEDDYHNPGYLVVLPDSTPATSTAAPSAPALSTPGIRDSAFSMESIDDFVNVPESGESAEASLDGSREFVNVSQELHPGAAKTEPAALSSQEAEEVEEEGAPDFENLQELNGNS

SEQ ID NO: 106 - protein, 521 aa, Artificial sequence
  Synthetic polypeptide
GSGGGGSALRNVPFRSEVLGWDPDSLADYFKKLNYKDCEKAVKKYHIDGARFLNLTENDIQKFPKLRVPILSKLSQEINKNEERRSIFTRKPQVPRFPEETESHEEDNGGWSSFEEDDYESPNDDQDGEDDGDYESPNEEEEAPVEDDADYEPPPSNDEEALQNSILPAKPFPNSNSMYIDRPPSGKTPQQPPVPPQRPMAALPPPPAGRNHSPLPPPQTNHEEPSRSRRSLAPFDREPFTLGKKPPFSDKPSIPAGRSLGEHLPKIQKPPLPPTTERHERSSPLPGKKPPVPKHGWGPDRRENDEDDVHQRPLPQPALLPMSSNTFPSRSTKPSPMNPLPSSHMPGAFSESNSSFPQSASLPPYFSQGPSNRPPIRAEGRNFPLPLPNKPRPPSPAEEENSLNEEWYVSYITRPEAEAALRKINQDGTFLVRDSSKKTTTNPYVLMVLYKDKVYNIQIRYQKESQVYLLGTGLRGKEDFLSVSDIIDYFRKMPLLLIDGKNRGSRYQCTLTHAAGYPGNS

SEQ ID NO: 107 - protein, 351 aa, Artificial sequence
  Synthetic polypeptide
GSPNSSASNASGAAAPTLPAHPSTLTHPQRRIDTLNSDGFTPEPARITSPDKPRPMPMDTSVYESPYSDPEELKDKKLFLKRDNLLIADIELGCGNFGSVRQGVYRMRKKQIDVAIKVLKQGTEKADTEEMMREAQIMHQLDNPYIVRLIGVCQAEALMLVMEMAGGGPLHKFLVGKREEIPVSNVAELLHQVSMGMKYLEEKNFVHRDLAARNVLLVNRHYAKISDFGLSKALGADDSYYTARSAGKWPLKWYAPECINFRKFSSRSDVWSYGVTMWEALSYGQKPYKKMKGPEVMAFIEQGKRMECPPECPPELYALMSDCWIYKWEDRPDFLTVEQRMRACYYSLGNS

SEQ ID NO: 108 - protein, 351 aa, Artificial sequence
  Synthetic polypeptide
GSPNSSASNASGAAAPTLPAHPSTLTHPQRRIDTLNSDGYTPEPARITSPDKPRPMPMDTSVYESPYSDPEELKDKKLFLKRDNLLIADIELGCGNFGSVRQGVYRMRKKQIDVAIKVLKQGTEKADTEEMMREAQIMHQLDNPYIVRLIGVCQAEALMLVMEMAGGGPLHKFLVGKREEIPVSNVAELLHQVSMGMKYLEEKNFVHRDLAARNVLLVNRHYAKISDFGLSKALGADDSFYTARSAGKWPLKWYAPECINFRKFSSRSDVWSYGVTMWEALSYGQKPYKKMKGPEVMAFIEQGKRMECPPECPPELYALMSDCWIYKWEDRPDFLTVEQRMRACYYSLGNS

SEQ ID NO: 109 - protein, 351 aa, Artificial sequence
  Synthetic polypeptide
GSPNSSASNASGAAAPTLPAHPSTLTHPQRRIDTLNSDGYTPEPARITSPDKPRPMPMDTSVYESPYSDPEELKDKKLFLKRDNLLIADIELGCGNFGSVRQGVYRMRKKQIDVAIKVLKQGTEKADTEEMMREAQIMHQLDNPYIVRLIGVCQAEALMLVMEMAGGGPLHKFLVGKREEIPVSNVAELLHQVSMGMKYLEEKNFVHRDLAARNVLLVNRHYAKISDFGLSKALGADDSYYTARSAGKWPLKWYAPECINFRKFSSRSDVWSYGVTMWEALSYGQKPYKKMRGPEVMAFIEQGKRMECPPECPPELYALMSDCWIYKWEDRPDFLTVEQRMRACYYSLGNS

SEQ ID NO: 110 - protein, 351 aa, Artificial sequence
  Synthetic polypeptide
GSPNSSASNASGAAAPTLPAHPSTLTHPQRRIDTLNSDGYTPEPARITSPDKPRPMPMDTSVYESPYSDPEELKDKKLFLKRDNLLIADIELGCGNFGSVRQGVYRMRKKQIDVAIKVLKQGTEKADTEEMMREAQIMHQLDNPYIVRLIGVCQAEALMLVMEMAGGGPLHKFLVGKREEIPVSNVAELLHQVSMGMKYLEEKNFVHRDLAARNVLLVNRHYAKISDFGLSKALGADDSYYTARSAGKWPLKWYAPECINFRKFSSRSDVWSYGVTMWEALSYGQKPYKKMKGPEVMAFIEQGKRMECPPECPPELYALMSDCWIYKWEDRPDFLTVEQRMRACFFSLGNS

SEQ ID NO: 111 - protein, 576 aa, Artificial sequence
  Synthetic polypeptide
MLLLVTSLLLCELPHPAFLLIPDIQMTQTTSSLSASLGDRVTISCRASQDISKYLNWYQQKPDGTVKLLIYHTSRLHSGVPSRFSGSGSGTDYSLTISNLEQEDIATYFCQQGNTLPYTFGGGTKLEITGSTSGSGKPGSGEGSTKGEVKLQESGPGLVAPSQSLSVTCTVSGVSLPDYGVSWIRQPPRKGLEWLGVIWGSETTYYNSALKSRLTIIKDNSKSQVFLKMNSLQTDDTAIYYCAKHYYYGGSYAMDYWGQGTSVTVSSAAAIEVMYPPPYLDNEKSNGTIIHVKGKHLAPSPLFPGPSKPFWVLVVVGGVLAAYSLLVTVAFIIFWVGSHCHRLPGSYDSTSSDSLYPRGIQFKRPHTVAPWPPAYPPVTSYPPLSQPDLLPIPRSPQPLGGSHRTPSSRRDSDGANSVASYENEGASGIRGAQAGWGVWGPSWTRLTPVSLPPEPACEDADEDEDDYHNPGYLVVLPDSTPATSTAAPSAPALSTPGIRDSAFSMESIDDYVNVPESGESAEASLDGSREYVNVSQELHPGAAKTEPAALSSQEAEEVEEEGAPDYENLQELNGNS

SEQ ID NO: 112 - protein, 576 aa, Artificial sequence
  Synthetic polypeptide
MLLLVTSLLLCELPHPAFLLIPDIQMTQTTSSLSASLGDRVTISCRASQDISKYLNWYQQKPDGTVKLLIYHTSRLHSGVPSRFSGSGSGTDYSLTISNLEQEDIATYFCQQGNTLPYTFGGGTKLEITGSTSGSGKPGSGEGSTKGEVKLQESGPGLVAPSQSLSVTCTVSGVSLPDYGVSWIRQPPRKGLEWLGVIWGSETTYYNSALKSRLTIIKDNSKSQVFLKMNSLQTDDTAIYYCAKHYYYGGSYAMDYWGQGTSVTVSSAAAIEVMYPPPYLDNEKSNGTIIHVKGKHLCPSPLFPGPSKPFWVLVVVGGVLACYSLLVTVAFIIFWVGSHCHRLPGSYDSTSSDSLYPRGIQFKRPHTVAPWPPAYPPVTSYPPLSQPDLLPIPRSPQPLGGSHRTPSSRRDSDGANSVASYENEGASGIRGAQAGWGVWGPSWTRLTPVSLPPEPACEDADEDEDDYHNPGYLVVLPDSTPATSTAAPSAPALSTPGIRDSAFSMESIDDFVNVPESGESAEASLDGSREFVNVSQELHPGAAKTEPAALSSQEAEEVEEEGAPDYENLQELNGNS

SEQ ID NO: 113 - protein, 544 aa, Artificial sequence
  Synthetic polypeptide
MLLLVTSLLLCELPHPAFLLIPDIQMTQTTSSLSASLGDRVTISCRASQDISKYLNWYQQKPDGTVKLLIYHTSRLHSGVPSRFSGSGSGTDYSLTISNLEQEDIATYFCQQGNTLPYTFGGGTKLEITGSTSGSGKPGSGEGSTKGEVKLQESGPGLVAPSQSLSVTCTVSGVSLPDYGVSWIRQPPRKGLEWLGVIWGSETTYYNSALKSRLTIIKDNSKSQVFLKMNSLQTDDTAIYYCAKHYYYGGSYAMDYWGQGTSVTVSSAAAESKYGPPCPPCPMALIVLGGVAGLLLFIGLGIFFGSHCHRLPGSYDSTSSDSLYPRGIQFKRPHTVAPWPPAYPPVTSYPPLSQPDLLPIPRSPQPLGGSHRTPSSRRDSDGANSVASYENEGASGIRGAQAGWGVWGPSWTRLTPVSLPPEPACEDADEDEDDYHNPGYLVVLPDSTPATSTAAPSAPALSTPGIRDSAFSMESIDDFVNVPESGESAEASLDGSREFVNVSQELHPGAAKTEPAALSSQEAEEVEEEGAPDYENLQELNGNS

SEQ ID NO: 114 - protein, 510 aa, Artificial sequence
  Synthetic polypeptide
MLLLVTSLLLCELPHPAFLLIPDIQMTQTTSSLSASLGDRVTISCRASQDISKYLNWYQQKPDGTVKLLIYHTSRLHSGVPSRFSGSGSGTDYSLTISNLEQEDIATYFCQQGNTLPYTFGGGTKLEITGSTSGSGKPGSGEGSTKGEVKLQESGPGLVAPSQSLSVTCTVSGVSLPDYGVSWIRQPPRKGLEWLGVIWGSETTYYNSALKSRLTIIKDNSKSQVFLKMNSLQTDDTAIYYCAKHYYYGGSYAMDYWGQGTSVTVSSAAAIEVMYPPPYLDNEKSNGTIIHVKGKHLCPSPLFPGPSKPFWVLVVVGGVLACYSLLVTVAFIIFWVGSHCHRLPGSYDSTSSDSLYPRGIQFKRPHTVAPWPPAYPPVTSYPPLSQPDLLPIPRSPQPLGGSHRTPSSRRDSDGANSVASYENEGASGIRGAQAGWGVWGPSWTRLTPVSLPPEPACEDADEDEDDYHNPGYLVVLPDSTPATSTAAPSAPALSTPGIRDSAFSMESIDD

SEQ ID NO: 115 - protein, 576 aa, Artificial sequence
  Synthetic polypeptide
MLLLVTSLLLCELPHPAFLLIPDIQMTQTTSSLSASLGDRVTISCRASQDISKYLNWYQQKPDGTVKLLIYHTSRLHSGVPSRFSGSGSGTDYSLTISNLEQEDIATYFCQQGNTLPYTFGGGTKLEITGSTSGSGKPGSGEGSTKGEVKLQESGPGLVAPSQSLSVTCTVSGVSLPDYGVSWIRQPPRKGLEWLGVIWGSETTYYNSALKSRLTIIKDNSKSQVFLKMNSLQTDDTAIYYCAKHYYYGGSYAMDYWGQGTSVTVSSAAAIEVMYPPPYLDNEKSNGTIIHVKGKHLAPSPLFPGPSKPFWVLVVVGGVLAAYSLLVTVAFIIFWVGSHCHRLPGSYDSTSSDSLYPRGIQFKRPHTVAPWPPAYPPVTSYPPLSQPDLLPIPRSPQPLGGSHRTPSSRRDSDGANSVASYENEGASGIRGAQAGWGVWGPSWTRLTPVSLPPEPACEDADEDEDDYHNPGYLVVLPDSTPATSTAAPSAPALSTPGIRDSAFSMESIDDFVNVPESGESAEASLDGSREFVNVSQELHPGAAKTEPAALSSQEAEEVEEEGAPDYENLQELNGNS

SEQ ID NO: 116 - protein, 510 aa, Artificial sequence
  Synthetic polypeptide
MLLLVTSLLLCELPHPAFLLIPDIQMTQTTSSLSASLGDRVTISCRASQDISKYLNWYQQKPDGTVKLLIYHTSRLHSGVPSRFSGSGSGTDYSLTISNLEQEDIATYFCQQGNTLPYTFGGGTKLEITGSTSGSGKPGSGEGSTKGEVKLQESGPGLVAPSQSLSVTCTVSGVSLPDYGVSWIRQPPRKGLEWLGVIWGSETTYYNSALKSRLTIIKDNSKSQVFLKMNSLQTDDTAIYYCAKHYYYGGSYAMDYWGQGTSVTVSSAAAIEVMYPPPYLDNEKSNGTIIHVKGKHLAPSPLFPGPSKPFWVLVVVGGVLAAYSLLVTVAFIIFWVGSHCHRLPGSYDSTSSDSLYPRGIQFKRPHTVAPWPPAYPPVTSYPPLSQPDLLPIPRSPQPLGGSHRTPSSRRDSDGANSVASYENEGASGIRGAQAGWGVWGPSWTRLTPVSLPPEPACEDADEDEDDYHNPGYLVVLPDSTPATSTAAPSAPALSTPGIRDSAFSMESIDD

SEQ ID NO: 117 - protein, 576 aa, Artificial sequence
  Synthetic polypeptide
MLLLVTSLLLCELPHPAFLLIPDIQMTQTTSSLSASLGDRVTISCRASQDISKYLNWYQQKPDGTVKLLIYHTSRLHSGVPSRFSGSGSGTDYSLTISNLEQEDIATYFCQQGNTLPYTFGGGTKLEITGSTSGSGKPGSGEGSTKGEVKLQESGPGLVAPSQSLSVTCTVSGVSLPDYGVSWIRQPPRKGLEWLGVIWGSETTYYNSALKSRLTIIKDNSKSQVFLKMNSLQTDDTAIYYCAKHYYYGGSYAMDYWGQGTSVTVSSAAAIEVMYPPPYLDNEKSNGTIIHVKGKHLCPSPLFPGPSKPFWVLVVVGGVLACYSLLVTVAFIIFWVGSHCHRLPGSYDSTSSDSLYPRGIQFKRPHTVAPWPPAYPPVTSYPPLSQPDLLPIPRSPQPLGGSHRTPSSRRDSDGANSVASYENEGASGIRGAQAGWGVWGPSWTRLTPVSLPPEPACEDADEDEDDYHNPGYLVVLPDSTPATSTAAPSAPALSTPGIRDSAFSMESIDDFVNVPESGESAEASLDGSREFVNVSQELHPGAAKTEPAALSSQEAEEVEEEGAPDFENLQELNGNS

SEQ ID NO: 118 - protein, 858 aa, Artificial sequence
  Synthetic polypeptide
MARSVTLVFLVLVSLTGLYAADIQMTQSPSSLSASVGDRVTITCRASQDVNTAVAWYQQKPGKAPKLLIYSASFLESGVPSRFSGSRSGTDFTLTISSLQPEDFATYYCQQHYTTPPTFGQGTKVEIKGSTSGSGKPGSGEGSGEVQLVESGGGLVQPGGSLRLSCAASGFNIKDTYIHWVRQAPGKGLEWVARIYPTNGYTRYADSVKGRFTISADTSKNTAYLQMNSLRAEDTAVYYCSRWGGDGFYAMDVWGQGTLVTVSSAAATTTPAPRPPTPAPTIASQPLSLRPEACRPAAGGAVHTRGLDFACDIYIWAPLAGTCGVLLLSLVITLYCKGSGGGGSALRNVPFRSEVLGWDPDSLADYFKKLNYKDCEKAVKKYHIDGARFLNLTENDIQKFPKLRVPILSKLSQEINKNEERRSIFTRKPQVPRFPEETESHEEDNGGWSSFEEDDYESPNDDQDGEDDGDYESPNEEEEAPVEDDADYEPPPSNDEEALQNSILPAKPFPNSNSMYIDRPPSGKTPQQPPVPPQRPMAALPPPPAGRNHSPLPPPQTNHEEPSRSRRSLAPFDREPFTLGKKPPFSDKPSIPAGRSLGEHLPKIQKPPLPPTTERHERSSPLPGKKPPVPKHGWGPDRRENDEDDVHQRPLPQPALLPMSSNTFPSRSTKPSPMNPLPSSHMPGAFSESNSSFPQSASLPPYFSQGPSNRPPIRAEGRNFPLPLPNKPRPPSPAEEENSLNEEWYVSYITRPEAEAALRKINQDGTFLVRDSSKKTTTNPYVLMVLYKDKVYNIQIRYQKESQVYLLGTGLRGKEDFLSVSDIIDYFRKMPLLLIDGKNRGSRYQCTLTHAAGYPGNS

SEQ ID NO: 119 - protein, 854 aa, Artificial sequence
  Synthetic polypeptide
MARSVTLVFLVLVSLTGLYAADIQMTQSPSSLSASVGDRVTITCRASQDVNTAVAWYQQKPGKAPKLLIYSASFLESGVPSRFSGSRSGTDFTLTISSLQPEDFATYYCQQHYTTPPTFGQGTKVEIKGSTSGSGKPGSGEGSGEVQLVESGGGLVQPGGSLRLSCAASGFNIKDTYIHWVRQAPGKGLEWVARIYPTNGYTRYADSVKGRFTISADTSKNTAYLQMNSLRAEDTAVYYCSRWGGDGFYAMDVWGQGTLVTVSSAAAIEVMYPPPYLDNEKSNGTIIHVKGKHLCPSPLFPGPSKPFWVLVVVGGVLACYSLLVTVAFIIFWVGSGGGGSALRNVPFRSEVLGWDPDSLADYFKKLNYKDCEKAVKKYHIDGARFLNLTENDIQKFPKLRVPILSKLSQEINKNEERRSIFTRKPQVPRFPEETESHEEDNGGWSSFEEDDYESPNDDQDGEDDGDYESPNEEEEAPVEDDADYEPPPSNDEEALQNSILPAKPFPNSNSMYIDRPPSGKTPQQPPVPPQRPMAALPPPPAGRNHSPLPPPQTNHEEPSRSRRSLAPFDREPFTLGKKPPFSDKPSIPAGRSLGEHLPKIQKPPLPPTTERHERSSPLPGKKPPVPKHGWGPDRRENDEDDVHQRPLPQPALLPMSSNTFPSRSTKPSPMNPLPSSHMPGAFSESNSSFPQSASLPPYFSQGPSNRPPIRAEGRNFPLPLPNKPRPPSPAEEENSLNEEWYVSYITRPEAEAALRKINQDGTFLVRDSSKKTTTNPYVLMVLYKDKVYNIQIRYQKESQVYLLGTGLRGKEDFLSVSDIIDYFRKMPLLLIDGKNRGSRYQCTLTHAAGYPGNS

SEQ ID NO: 120 - protein, 690 aa, Artificial sequence
  Synthetic polypeptide
MVATLLVTSLLLCELPHPAFLLIPDTEVQLVESGGGLVQPGGSLRLSCAASGFTFSSFGMHWVRQAPGKGLEWVAYISSDSSAIYYADTVKGRFTISRDNAKNSLYLQMNSLRDEDTAVYYCGRGRENIYYGSRLDYWGQGTTVTVSSGGGGSGGGGSGGGGSDIQLTQSPSFLSASVGDRVTITCKASQNVDTNVAWYQQKPGKAPKALIYSASYRYSGVPSRFSGSGSGTDFTLTISSLQPEDFATYYCQQYNNYPFTFGQGTKLEIKAAAIEVMYPPPYLDNEKSNGTIIHVKGKHLCPSPLFPGPSKPFWVLVVVGGVLACYSLLVTVAFIIFWVGSPNSSASNASGAAAPTLPAHPSTLTHPQRRIDTLNSDGFTPEPARITSPDKPRPMPMDTSVYESPYSDPEELKDKKLFLKRDNLLIADIELGCGNFGSVRQGVYRMRKKQIDVAIKVLKQGTEKADTEEMMREAQIMHQLDNPYIVRLIGVCQAEALMLVMEMAGGGPLHKFLVGKREEIPVSNVAELLHQVSMGMKYLEEKNFVHRDLAARNVLLVNRHYAKISDFGLSKALGADDSYYTARSAGKWPLKWYAPECINFRKFSSRSDVWSYGVTMWEALSYGQKPYKKMKGPEVMAFIEQGKRMECPPECPPELYALMSDCWIYKWEDRPDFLTVEQRMRACYYSLGNS

SEQ ID NO: 121 - protein, 690 aa, Artificial sequence
  Synthetic polypeptide
MVATLLVTSLLLCELPHPAFLLIPDTEVQLVESGGGLVQPGGSLRLSCAASGFTFSSFGMHWVRQAPGKGLEWVAYISSDSSAIYYADTVKGRFTISRDNAKNSLYLQMNSLRDEDTAVYYCGRGRENIYYGSRLDYWGQGTTVTVSSGGGGSGGGGSGGGGSDIQLTQSPSFLSASVGDRVTITCKASQNVDTNVAWYQQKPGKAPKALIYSASYRYSGVPSRFSGSGSGTDFTLTISSLQPEDFATYYCQQYNNYPFTFGQGTKLEIKAAAIEVMYPPPYLDNEKSNGTIIHVKGKHLCPSPLFPGPSKPFWVLVVVGGVLACYSLLVTVAFIIFWVGSPNSSASNASGAAAPTLPAHPSTLTHPQRRIDTLNSDGYTPEPARITSPDKPRPMPMDTSVYESPYSDPEELKDKKLFLKRDNLLIADIELGCGNFGSVRQGVYRMRKKQIDVAIKVLKQGTEKADTEEMMREAQIMHQLDNPYIVRLIGVCQAEALMLVMEMAGGGPLHKFLVGKREEIPVSNVAELLHQVSMGMKYLEEKNFVHRDLAARNVLLVNRHYAKISDFGLSKALGADDSFYTARSAGKWPLKWYAPECINFRKFSSRSDVWSYGVTMWEALSYGQKPYKKMKGPEVMAFIEQGKRMECPPECPPELYALMSDCWIYKWEDRPDFLTVEQRMRACYYSLGNS

SEQ ID NO: 122 - protein, 690 aa, Artificial sequence
  Synthetic polypeptide
MVATLLVTSLLLCELPHPAFLLIPDTEVQLVESGGGLVQPGGSLRLSCAASGFTFSSFGMHWVRQAPGKGLEWVAYISSDSSAIYYADTVKGRFTISRDNAKNSLYLQMNSLRDEDTAVYYCGRGRENIYYGSRLDYWGQGTTVTVSSGGGGSGGGGSGGGGSDIQLTQSPSFLSASVGDRVTITCKASQNVDTNVAWYQQKPGKAPKALIYSASYRYSGVPSRFSGSGSGTDFTLTISSLQPEDFATYYCQQYNNYPFTFGQGTKLEIKAAAIEVMYPPPYLDNEKSNGTIIHVKGKHLCPSPLFPGPSKPFWVLVVVGGVLACYSLLVTVAFIIFWVGSPNSSASNASGAAAPTLPAHPSTLTHPQRRIDTLNSDGYTPEPARITSPDKPRPMPMDTSVYESPYSDPEELKDKKLFLKRDNLLIADIELGCGNFGSVRQGVYRMRKKQIDVAIKVLKQGTEKADTEEMMREAQIMHQLDNPYIVRLIGVCQAEALMLVMEMAGGGPLHKFLVGKREEIPVSNVAELLHQVSMGMKYLEEKNFVHRDLAARNVLLVNRHYAKISDFGLSKALGADDSYYTARSAGKWPLKWYAPECINFRKFSSRSDVWSYGVTMWEALSYGQKPYKKMRGPEVMAFIEQGKRMECPPECPPELYALMSDCWIYKWEDRPDFLTVEQRMRACYYSLGNS

SEQ ID NO: 123 - protein, 690 aa, Artificial sequence
  Synthetic polypeptide
MVATLLVTSLLLCELPHPAFLLIPDTEVQLVESGGGLVQPGGSLRLSCAASGFTFSSFGMHWVRQAPGKGLEWVAYISSDSSAIYYADTVKGRFTISRDNAKNSLYLQMNSLRDEDTAVYYCGRGRENIYYGSRLDYWGQGTTVTVSSGGGGSGGGGSGGGGSDIQLTQSPSFLSASVGDRVTITCKASQNVDTNVAWYQQKPGKAPKALIYSASYRYSGVPSRFSGSGSGTDFTLTISSLQPEDFATYYCQQYNNYPFTFGQGTKLEIKAAAIEVMYPPPYLDNEKSNGTIIHVKGKHLCPSPLFPGPSKPFWVLVVVGGVLACYSLLVTVAFIIFWVGSPNSSASNASGAAAPTLPAHPSTLTHPQRRIDTLNSDGYTPEPARITSPDKPRPMPMDTSVYESPYSDPEELKDKKLFLKRDNLLIADIELGCGNFGSVRQGVYRMRKKQIDVAIKVLKQGTEKADTEEMMREAQIMHQLDNPYIVRLIGVCQAEALMLVMEMAGGGPLHKFLVGKREEIPVSNVAELLHQVSMGMKYLEEKNFVHRDLAARNVLLVNRHYAKISDFGLSKALGADDSYYTARSAGKWPLKWYAPECINFRKFSSRSDVWSYGVTMWEALSYGQKPYKKMKGPEVMAFIEQGKRMECPPECPPELYALMSDCWIYKWEDRPDFLTVEQRMRACFFSLGNS

SEQ ID NO: 124 - DNA, 207 bp, Artificial sequence
  Synthetic polynucleotide
gcggccgcaatcgaagtgatgtaccctccaccttacctggacaacgagaagtccaacggcaccatcatccacgtgaagggcaagcacctggctccttctccactgttccctggacctagcaagcctttctgggtgctcgtggttgttggcggcgtgctggccgcttattctctgctggtcaccgtggccttcatcatcttttgggtc

SEQ ID NO: 125 - DNA, 723 bp, Artificial sequence
  Synthetic polynucleotide
ggatcccactgtcacagactgcctggcagctacgatagcaccagcagcgacagcctgtatcctcggggcatccagttcaagaggcctcatacagttgccccttggcctcctgcctatcctcctgtgacaagctaccctccactgagccaacctgacctgctgcctattcctagatctcctcagcctctcggcggcagccacagaacacctagcagcagaagagatagcgacggcgccaatagcgtggcctcttatgagaatgagggcgcctctggcattagaggcgctcaagctggatggggagtttggggccctagctggacaagactgacacctgtgtctctgcctccagagcctgcctgtgaagatgccgacgaggacgaggatgactatcacaaccctggctacctggtggtgctgcctgatagcacaccagccacatctacagccgctccatctgctccagctctgagcacacctggcatcagagacagcgccttcagcatggaatccatcgacgacttcgtgaacgtgccagagtctggcgaatctgccgaagcctctctggacggctcccgggaattcgtgaatgtgtcccaagaactgcaccctggcgccgctaaaacagaacctgctgctctgtctagccaagaggccgaggaagtggaagaagaaggcgcccctgactacgagaacctgcaagagctgaacgggaattcctga

SEQ ID NO: 126 - DNA, 525 bp, Artificial sequence
  Synthetic polynucleotide
ggatcccactgtcacagactgcctggcagctacgatagcaccagcagcgacagcctgtatcctcggggcatccagttcaagaggcctcatacagttgccccttggcctcctgcctatcctcctgtgacaagctaccctccactgagccaacctgacctgctgcctattcctagatctcctcagcctctcggcggcagccacagaacacctagcagcagaagagatagcgacggcgccaatagcgtggcctcttatgagaatgagggcgcctctggcattagaggcgctcaagctggatggggagtttggggccctagctggacaagactgacacctgtgtctctgcctccagagcctgcctgtgaagatgccgacgaggacgaggatgactatcacaaccctggctacctggtggtgctgcctgatagcacaccagccacatctacagccgctccatctgctccagctctgagcacacctggcatcagagacagcgccttcagcatggaatccatcgacgactag

SEQ ID NO: 127 - DNA, 723 bp, Artificial sequence
  Synthetic polynucleotide
ggatcccactgtcacagactgcctggcagctacgatagcaccagcagcgacagcctgtatcctcggggcatccagttcaagaggcctcatacagttgccccttggcctcctgcctatcctcctgtgacaagctaccctccactgagccaacctgacctgctgcctattcctagatctcctcagcctctcggcggcagccacagaacacctagcagcagaagagatagcgacggcgccaatagcgtggcctcttatgagaatgagggcgcctctggcattagaggcgctcaagctggatggggagtttggggccctagctggacaagactgacacctgtgtctctgcctccagagcctgcctgtgaagatgccgacgaggacgaggatgactatcacaaccctggctacctggtggtgctgcctgatagcacaccagccacatctacagccgctccatctgctccagctctgagcacacctggcatcagagacagcgccttcagcatggaatccatcgacgacttcgtgaacgtgccagagtctggcgaatctgccgaagcctctctggacggctcccgggaattcgtgaatgtgtcccaagaactgcaccctggcgccgctaaaacagaacctgctgctctgtctagccaagaggccgaggaagtggaagaagaaggcgcccctgacttcgagaacctgcaagagctgaacgggaattcctga

SEQ ID NO: 128 - DNA, 1566 bp, Artificial sequence
  Synthetic polynucleotide
ggatccggcggtggtggatctgctctgagaaacgtgcccttcagatccgaggttctcggctgggaccctgatagcctggccgactacttcaagaagctgaactacaaggactgcgagaaggccgtgaagaagtaccatatcgacggcgccagattcctgaacctgaccgagaacgacatccagaagttccccaagctgagagtgcccatcctgagcaagctgagccaagagatcaacaagaacgaggaacggcggagcatcttcaccagaaagccccaggtgccaagattccccgaggaaacagagagccacgaggaagataacggcggctggtccagcttcgaagaggacgactacgagagccccaacgacgatcaggatggcgaggatgatggcgattacgagtcccctaacgaagaggaagaggcccctgttgaggacgacgccgattatgagcctcctcctagcaacgacgaagaagccctgcagaacagcatcctgcctgccaagccttttccaaacagcaacagcatgtacatcgaccggcctccaagcggcaaaacacctcagcaacctccagttcctcctcagcgacctatggctgcattgcctcctccaccagccggaagaaatcactctccactgcctccacctcagaccaatcacgaggaacccagcagaagcagacgatcactggccccatttgatagagagcccttcacactgggcaagaagcctccattcagcgacaagcctagcatccctgctggaagaagcctgggcgagcatctgcctaagatccagaaacctcctctgccacctaccaccgagagacacgagagatctagccctctgcctggcaagaaaccacctgtgcctaaacacggctggggcccagacagaagggaaaacgacgaggacgatgtgcaccagaggccattgcctcaacctgctctgctgcccatgtccagcaacacattccccagcaggtccaccaaaccttctccaatgaatcccctgcctagcagccacatgcctggcgcctttagcgagagcaatagcagctttcctcagagcgccagcctgcctccttactttagccagggacctagcaaccggccacctatcagagccgagggcagaaattttcccctgccactgcctaacaagcccagacctccatctcctgccgaggaagagaacagcctgaacgaagagtggtacgtgtcctacatcaccagacctgaagccgaggctgccctgagaaagatcaaccaggatggcacctttctcgtgcgggacagcagcaaaaagaccaccaccaatccttacgtgctgatggtgctgtacaaggacaaggtgtacaacatccagatccgctaccagaaagaaagccaggtgtacctgctcggcaccggcctgagaggcaaagaggattttctgagcgtcagcgacatcatcgactactttagaaagatgcccctgctgctgatcgacggcaagaacagaggcagcagataccagtgcacactgacacacgctgccggctatcccgggaattcctga

SEQ ID NO: 129 - DNA, 1056 bp, Artificial sequence
  Synthetic polynucleotide
ggatcccctaacagcagcgcctctaatgctagcggagctgctgctcctacactgcctgctcacccttctacactgacacaccctcagcggcggatcgatacactgaactctgatggcttcacccctgagccagccagaatcacaagccccgacaagcccagacctatgcctatggataccagcgtgtacgagagcccctacagcgaccctgaggaactgaaggacaagaagctgttcctgaagcgggacaacctgctgattgccgacatcgaactcggctgcggcaattttggctctgtcagacagggcgtgtaccggatgcggaagaaacagatcgacgtggccatcaaggtgctgaagcagggaaccgagaaggccgataccgaggaaatgatgcgcgaggcccagatcatgcaccagctggacaatccttacatcgtgcggctgatcggcgtgtgtcaagccgaagctctgatgctggttatggaaatggcaggcggcggacccctgcacaagtttctcgttggcaagagagaggaaatccccgtcagcaacgtggccgaactgctgcaccaagtgtctatgggcatgaagtacctggaagagaagaacttcgtgcaccgcgacctggccgccagaaatgtgctgctggtcaacagacactacgccaagatcagcgacttcggcctgtctaaagccctgggcgccgacgatagctactacacagccagatctgccggaaagtggcccctgaagtggtacgcccctgagtgcatcaacttcagaaagttcagcagccgcagcgacgtgtggtcttacggcgttacaatgtgggaagccctgagctacggccagaaaccttacaagaagatgaagggccccgaagtcatggccttcatcgaacagggcaagagaatggaatgccctcctgagtgccctccagagctgtatgccctgatgagcgactgctggatctataagtgggaagatcggcccgacttcctgaccgtggaacagagaatgagagcctgctactacagcctggggaattcctga

SEQ ID NO: 130 - DNA, 1056 bp, Artificial sequence
  Synthetic polynucleotide
ggatcccctaacagcagcgcctctaatgctagcggagctgctgctcctacactgcctgctcacccttctacactgacacaccctcagcggcggatcgatacactgaactctgatggctacacccctgagccagccagaatcacaagccccgacaagcccagacctatgcctatggataccagcgtgtacgagagcccctacagcgaccctgaggaactgaaggacaagaagctgttcctgaagcgggacaacctgctgattgccgacatcgaactcggctgcggcaattttggctctgtcagacagggcgtgtaccggatgcggaagaaacagatcgacgtggccatcaaggtgctgaagcagggaaccgagaaggccgataccgaggaaatgatgcgcgaggcccagatcatgcaccagctggacaatccttacatcgtgcggctgatcggcgtgtgtcaagccgaagctctgatgctggttatggaaatggcaggcggcggacccctgcacaagtttctcgttggcaagagagaggaaatccccgtcagcaacgtggccgaactgctgcaccaagtgtctatgggcatgaagtacctggaagagaagaacttcgtgcaccgcgacctggccgccagaaatgtgctgctggtcaacagacactacgccaagatcagcgacttcggcctgtctaaagccctgggcgccgacgatagcttctacacagccagatctgccggaaagtggcccctgaagtggtacgcccctgagtgcatcaacttcagaaagttcagcagccgcagcgacgtgtggtcttacggcgttacaatgtgggaagccctgagctacggccagaaaccttacaagaagatgaagggccccgaagtcatggccttcatcgaacagggcaagagaatggaatgccctcctgagtgccctccagagctgtatgccctgatgagcgactgctggatctataagtgggaagatcggcccgacttcctgaccgtggaacagagaatgagagcctgctactacagcctggggaattcctga

SEQ ID NO: 131 - protein, 1056 aa, Artificial sequence
  Synthetic polynucleotide
GGATCCCCTAACAGCAGCGCCTCTAATGCTAGCGGAGCTGCTGCTCCTACACTGCCTGCTCACCCTTCTACACTGACACACCCTCAGCGGCGGATCGATACACTGAACTCTGATGGCTACACCCCTGAGCCAGCCAGAATCACAAGCCCCGACAAGCCCAGACCTATGCCTATGGATACCAGCGTGTACGAGAGCCCCTACAGCGACCCTGAGGAACTGAAGGACAAGAAGCTGTTCCTGAAGCGGGACAACCTGCTGATTGCCGACATCGAACTCGGCTGCGGCAATTTTGGCTCTGTCAGACAGGGCGTGTACCGGATGCGGAAGAAACAGATCGACGTGGCCATCAAGGTGCTGAAGCAGGGAACCGAGAAGGCCGATACCGAGGAAATGATGCGCGAGGCCCAGATCATGCACCAGCTGGACAATCCTTACATCGTGCGGCTGATCGGCGTGTGTCAAGCCGAAGCTCTGATGCTGGTTATGGAAATGGCAGGCGGCGGACCCCTGCACAAGTTTCTCGTTGGCAAGAGAGAGGAAATCCCCGTCAGCAACGTGGCCGAACTGCTGCACCAAGTGTCTATGGGCATGAAGTACCTGGAAGAGAAGAACTTCGTGCACCGCGACCTGGCCGCCAGAAATGTGCTGCTGGTCAACAGACACTACGCCAAGATCAGCGACTTCGGCCTGTCTAAAGCCCTGGGCGCCGACGATAGCTACTACACAGCCAGATCTGCCGGAAAGTGGCCCCTGAAGTGGTACGCCCCTGAGTGCATCAACTTCAGAAAGTTCAGCAGCCGCAGCGACGTGTGGTCTTACGGCGTTACAATGTGGGAAGCCCTGAGCTACGGCCAGAAACCTTACAAGAAGATGAGGGGCCCCGAAGTCATGGCCTTCATCGAACAGGGCAAGAGAATGGAATGCCCTCCTGAGTGCCCTCCAGAGCTGTATGCCCTGATGAGCGACTGCTGGATCTATAAGTGGGAAGATCGGCCCGACTTCCTGACCGTGGAACAGAGAATGAGAGCCTGCTACTACAGCCTGGGGAATTCCTGA

SEQ ID NO: 132 - protein, 1056 aa, Artificial sequence
  Synthetic polynucleotide
GGATCCCCTAACAGCAGCGCCTCTAATGCTAGCGGAGCTGCTGCTCCTACACTGCCTGCTCACCCTTCTACACTGACACACCCTCAGCGGCGGATCGATACACTGAACTCTGATGGCTACACCCCTGAGCCAGCCAGAATCACAAGCCCCGACAAGCCCAGACCTATGCCTATGGATACCAGCGTGTACGAGAGCCCCTACAGCGACCCTGAGGAACTGAAGGACAAGAAGCTGTTCCTGAAGCGGGACAACCTGCTGATTGCCGACATCGAACTCGGCTGCGGCAATTTTGGCTCTGTCAGACAGGGCGTGTACCGGATGCGGAAGAAACAGATCGACGTGGCCATCAAGGTGCTGAAGCAGGGAACCGAGAAGGCCGATACCGAGGAAATGATGCGCGAGGCCCAGATCATGCACCAGCTGGACAATCCTTACATCGTGCGGCTGATCGGCGTGTGTCAAGCCGAAGCTCTGATGCTGGTTATGGAAATGGCAGGCGGCGGACCCCTGCACAAGTTTCTCGTTGGCAAGAGAGAGGAAATCCCCGTCAGCAACGTGGCCGAACTGCTGCACCAAGTGTCTATGGGCATGAAGTACCTGGAAGAGAAGAACTTCGTGCACCGCGACCTGGCCGCCAGAAATGTGCTGCTGGTCAACAGACACTACGCCAAGATCAGCGACTTCGGCCTGTCTAAAGCCCTGGGCGCCGACGATAGCTACTACACAGCCAGATCTGCCGGAAAGTGGCCCCTGAAGTGGTACGCCCCTGAGTGCATCAACTTCAGAAAGTTCAGCAGCCGCAGCGACGTGTGGTCTTACGGCGTTACAATGTGGGAAGCCCTGAGCTACGGCCAGAAACCTTACAAGAAGATGAAGGGCCCCGAAGTCATGGCCTTCATCGAACAGGGCAAGAGAATGGAATGCCCTCCTGAGTGCCCTCCAGAGCTGTATGCCCTGATGAGCGACTGCTGGATCTATAAGTGGGAAGATCGGCCCGACTTCCTGACCGTGGAACAGAGAATGAGAGCCTGCTTCTTCAGCCTGGGGAATTCCTGA

SEQ ID NO: 133 - protein, 1731 aa, Artificial sequence
  Synthetic polynucleotide
ATGCTTCTCCTGGTGACAAGCCTTCTGCTCTGTGAGTTACCACACCCAGCATTCCTCCTGATCCCAGACATCCAGATGACACAGACTACATCCTCCCTGTCTGCCTCTCTGGGAGACAGAGTCACCATCAGTTGCAGGGCAAGTCAGGACATTAGTAAATATTTAAATTGGTATCAGCAGAAACCAGATGGAACTGTTAAACTCCTGATCTACCATACATCAAGATTACACTCAGGAGTCCCATCAAGGTTCAGTGGCAGTGGGTCTGGAACAGATTATTCTCTCACCATTAGCAACCTGGAGCAAGAAGATATTGCCACTTACTTTTGCCAACAGGGTAATACGCTTCCGTACACGTTCGGAGGGGGGACTAAGTTGGAAATAACAGGCTCCACCTCTGGATCCGGCAAGCCCGGATCTGGCGAGGGATCCACCAAGGGCGAGGTGAAACTGCAGGAGTCAGGACCTGGCCTGGTGGCGCCCTCACAGAGCCTGTCCGTCACATGCACTGTCTCAGGGGTCTCATTACCCGACTATGGTGTAAGCTGGATTCGCCAGCCTCCACGAAAGGGTCTGGAGTGGCTGGGAGTAATATGGGGTAGTGAAACCACATACTATAATTCAGCTCTCAAATCCAGACTGACCATCATCAAGGACAACTCCAAGAGCCAAGTTTTCTTAAAAATGAACAGTCTGCAAACTGATGACACAGCCATTTACTACTGTGCCAAACATTATTACTACGGTGGTAGCTATGCTATGGACTACTGGGGTCAAGGAACCTCAGTCACCGTCTCCTCAGCGGCCGCAATCGAAGTGATGTACCCTCCACCTTACCTGGACAACGAGAAGTCCAACGGCACCATCATCCACGTGAAGGGCAAGCACCTGGCTCCTTCTCCACTGTTCCCTGGACCTAGCAAGCCTTTCTGGGTGCTCGTGGTTGTTGGCGGCGTGCTGGCCGCTTATTCTCTGCTGGTCACCGTGGCCTTCATCATCTTTTGGGTCGGATCCCACTGTCACAGACTGCCTGGCAGCTACGATAGCACCAGCAGCGACAGCCTGTATCCTCGGGGCATCCAGTTCAAGAGGCCTCATACAGTTGCCCCTTGGCCTCCTGCCTATCCTCCTGTGACAAGCTACCCTCCACTGAGCCAACCTGACCTGCTGCCTATTCCTAGATCTCCTCAGCCTCTCGGCGGCAGCCACAGAACACCTAGCAGCAGAAGAGATAGCGACGGCGCCAATAGCGTGGCCTCTTATGAGAATGAGGGCGCCTCTGGCATTAGAGGCGCTCAAGCTGGATGGGGAGTTTGGGGCCCTAGCTGGACAAGACTGACACCTGTGTCTCTGCCTCCAGAGCCTGCCTGTGAAGATGCCGACGAGGACGAGGATGACTATCACAACCCTGGCTACCTGGTGGTGCTGCCTGATAGCACACCAGCCACATCTACAGCCGCTCCATCTGCTCCAGCTCTGAGCACACCTGGCATCAGAGACAGCGCCTTCAGCATGGAATCCATCGACGACTACGTGAACGTGCCAGAGTCTGGCGAATCTGCCGAAGCCTCTCTGGACGGCTCCCGGGAATATGTGAATGTGTCCCAAGAACTGCACCCTGGCGCCGCTAAAACAGAACCTGCTGCTCTGTCTAGCCAAGAGGCCGAGGAAGTGGAAGAAGAAGGCGCCCCTGACTACGAGAACCTGCAAGAGCTGAACGGGAATTCCTGA

SEQ ID NO: 134 - DNA, 1731 bp, Artificial sequence
  Synthetic polynucleotide
atgcttctcctggtgacaagccttctgctctgtgagttaccacacccagcattcctcctgatcccagacatccagatgacacagactacatcctccctgtctgcctctctgggagacagagtcaccatcagttgcagggcaagtcaggacattagtaaatatttaaattggtatcagcagaaaccagatggaactgttaaactcctgatctaccatacatcaagattacactcaggagtcccatcaaggttcagtggcagtgggtctggaacagattattctctcaccattagcaacctggagcaagaagatattgccacttacttttgccaacagggtaatacgcttccgtacacgttcggaggggggactaagttggaaataacaggctccacctctggatccggcaagcccggatctggcgagggatccaccaagggcgaggtgaaactgcaggagtcaggacctggcctggtggcgccctcacagagcctgtccgtcacatgcactgtctcaggggtctcattacccgactatggtgtaagctggattcgccagcctccacgaaagggtctggagtggctgggagtaatatggggtagtgaaaccacatactataattcagctctcaaatccagactgaccatcatcaaggacaactccaagagccaagttttcttaaaaatgaacagtctgcaaactgatgacacagccatttactactgtgccaaacattattactacggtggtagctatgctatggactactggggtcaaggaacctcagtcaccgtctcctcagcggccgcaatcgaagtgatgtaccctccaccttacctggacaacgagaagtccaacggcaccatcatccacgtgaagggcaagcacctgtgtccttctccactgttccctggacctagcaagcctttctgggtgctcgtggttgttggcggcgtgctggcctgttattctctgctggtcaccgtggccttcatcatcttttgggtcggatcccactgtcacagactgcctggcagctacgatagcaccagcagcgacagcctgtatcctcggggcatccagttcaagaggcctcatacagttgccccttggcctcctgcctatcctcctgtgacaagctaccctccactgagccaacctgacctgctgcctattcctagatctcctcagcctctcggcggcagccacagaacacctagcagcagaagagatagcgacggcgccaatagcgtggcctcttatgagaatgagggcgcctctggcattagaggcgctcaagctggatggggagtttggggccctagctggacaagactgacacctgtgtctctgcctccagagcctgcctgtgaagatgccgacgaggacgaggatgactatcacaaccctggctacctggtggtgctgcctgatagcacaccagccacatctacagccgctccatctgctccagctctgagcacacctggcatcagagacagcgccttcagcatggaatccatcgacgacttcgtgaacgtgccagagtctggcgaatctgccgaagcctctctggacggctcccgggaattcgtgaatgtgtcccaagaactgcaccctggcgccgctaaaacagaacctgctgctctgtctagccaagaggccgaggaagtggaagaagaaggcgcccctgactacgagaacctgcaagagctgaacgggaattcctga

SEQ ID NO: 135 - DNA, 1635 bp, Artificial sequence
  Synthetic polynucleotide
atgcttctcctggtgacaagccttctgctctgtgagttaccacacccagcattcctcctgatcccagacatccagatgacacagactacatcctccctgtctgcctctctgggagacagagtcaccatcagttgcagggcaagtcaggacattagtaaatatttaaattggtatcagcagaaaccagatggaactgttaaactcctgatctaccatacatcaagattacactcaggagtcccatcaaggttcagtggcagtgggtctggaacagattattctctcaccattagcaacctggagcaagaagatattgccacttacttttgccaacagggtaatacgcttccgtacacgttcggaggggggactaagttggaaataacaggctccacctctggatccggcaagcccggatctggcgagggatccaccaagggcgaggtgaaactgcaggagtcaggacctggcctggtggcgccctcacagagcctgtccgtcacatgcactgtctcaggggtctcattacccgactatggtgtaagctggattcgccagcctccacgaaagggtctggagtggctgggagtaatatggggtagtgaaaccacatactataattcagctctcaaatccagactgaccatcatcaaggacaactccaagagccaagttttcttaaaaatgaacagtctgcaaactgatgacacagccatttactactgtgccaaacattattactacggtggtagctatgctatggactactggggtcaaggaacctcagtcaccgtctcctcagcggccgcagaatccaaatacggaccaccgtgccctccttgtcctatggcgctcatagtcctcggtggcgtagccggacttttgctgtttataggcttggggatcttctttggatcccactgtcacagactgcctggcagctacgatagcaccagcagcgacagcctgtatcctcggggcatccagttcaagaggcctcatacagttgccccttggcctcctgcctatcctcctgtgacaagctaccctccactgagccaacctgacctgctgcctattcctagatctcctcagcctctcggcggcagccacagaacacctagcagcagaagagatagcgacggcgccaatagcgtggcctcttatgagaatgagggcgcctctggcattagaggcgctcaagctggatggggagtttggggccctagctggacaagactgacacctgtgtctctgcctccagagcctgcctgtgaagatgccgacgaggacgaggatgactatcacaaccctggctacctggtggtgctgcctgatagcacaccagccacatctacagccgctccatctgctccagctctgagcacacctggcatcagagacagcgccttcagcatggaatccatcgacgacttcgtgaacgtgccagagtctggcgaatctgccgaagcctctctggacggctcccgggaattcgtgaatgtgtcccaagaactgcaccctggcgccgctaaaacagaacctgctgctctgtctagccaagaggccgaggaagtggaagaagaaggcgcccctgactacgagaacctgcaagagctgaacgggaattcctga

SEQ ID NO: 136 - DNA, 1533 bp, Artificial sequence
  Synthetic polynucleotide
atgcttctcctggtgacaagccttctgctctgtgagttaccacacccagcattcctcctgatcccagacatccagatgacacagactacatcctccctgtctgcctctctgggagacagagtcaccatcagttgcagggcaagtcaggacattagtaaatatttaaattggtatcagcagaaaccagatggaactgttaaactcctgatctaccatacatcaagattacactcaggagtcccatcaaggttcagtggcagtgggtctggaacagattattctctcaccattagcaacctggagcaagaagatattgccacttacttttgccaacagggtaatacgcttccgtacacgttcggaggggggactaagttggaaataacaggctccacctctggatccggcaagcccggatctggcgagggatccaccaagggcgaggtgaaactgcaggagtcaggacctggcctggtggcgccctcacagagcctgtccgtcacatgcactgtctcaggggtctcattacccgactatggtgtaagctggattcgccagcctccacgaaagggtctggagtggctgggagtaatatggggtagtgaaaccacatactataattcagctctcaaatccagactgaccatcatcaaggacaactccaagagccaagttttcttaaaaatgaacagtctgcaaactgatgacacagccatttactactgtgccaaacattattactacggtggtagctatgctatggactactggggtcaaggaacctcagtcaccgtctcctcagcggccgcaatcgaagtgatgtaccctccaccttacctggacaacgagaagtccaacggcaccatcatccacgtgaagggcaagcacctgtgtccttctccactgttccctggacctagcaagcctttctgggtgctcgtggttgttggcggcgtgctggcctgttattctctgctggtcaccgtggccttcatcatcttttgggtcggatcccactgtcacagactgcctggcagctacgatagcaccagcagcgacagcctgtatcctcggggcatccagttcaagaggcctcatacagttgccccttggcctcctgcctatcctcctgtgacaagctaccctccactgagccaacctgacctgctgcctattcctagatctcctcagcctctcggcggcagccacagaacacctagcagcagaagagatagcgacggcgccaatagcgtggcctcttatgagaatgagggcgcctctggcattagaggcgctcaagctggatggggagtttggggccctagctggacaagactgacacctgtgtctctgcctccagagcctgcctgtgaagatgccgacgaggacgaggatgactatcacaaccctggctacctggtggtgctgcctgatagcacaccagccacatctacagccgctccatctgctccagctctgagcacacctggcatcagagacagcgccttcagcatggaatccatcgacgactag

SEQ ID NO: 137 - DNA, 1731 bp, Artificial sequence
  Synthetic polynucleotide
atgcttctcctggtgacaagccttctgctctgtgagttaccacacccagcattcctcctgatcccagacatccagatgacacagactacatcctccctgtctgcctctctgggagacagagtcaccatcagttgcagggcaagtcaggacattagtaaatatttaaattggtatcagcagaaaccagatggaactgttaaactcctgatctaccatacatcaagattacactcaggagtcccatcaaggttcagtggcagtgggtctggaacagattattctctcaccattagcaacctggagcaagaagatattgccacttacttttgccaacagggtaatacgcttccgtacacgttcggaggggggactaagttggaaataacaggctccacctctggatccggcaagcccggatctggcgagggatccaccaagggcgaggtgaaactgcaggagtcaggacctggcctggtggcgccctcacagagcctgtccgtcacatgcactgtctcaggggtctcattacccgactatggtgtaagctggattcgccagcctccacgaaagggtctggagtggctgggagtaatatggggtagtgaaaccacatactataattcagctctcaaatccagactgaccatcatcaaggacaactccaagagccaagttttcttaaaaatgaacagtctgcaaactgatgacacagccatttactactgtgccaaacattattactacggtggtagctatgctatggactactggggtcaaggaacctcagtcaccgtctcctcagcggccgcaatcgaagtgatgtaccctccaccttacctggacaacgagaagtccaacggcaccatcatccacgtgaagggcaagcacctggctccttctccactgttccctggacctagcaagcctttctgggtgctcgtggttgttggcggcgtgctggccgcttattctctgctggtcaccgtggccttcatcatcttttgggtcggatcccactgtcacagactgcctggcagctacgatagcaccagcagcgacagcctgtatcctcggggcatccagttcaagaggcctcatacagttgccccttggcctcctgcctatcctcctgtgacaagctaccctccactgagccaacctgacctgctgcctattcctagatctcctcagcctctcggcggcagccacagaacacctagcagcagaagagatagcgacggcgccaatagcgtggcctcttatgagaatgagggcgcctctggcattagaggcgctcaagctggatggggagtttggggccctagctggacaagactgacacctgtgtctctgcctccagagcctgcctgtgaagatgccgacgaggacgaggatgactatcacaaccctggctacctggtggtgctgcctgatagcacaccagccacatctacagccgctccatctgctccagctctgagcacacctggcatcagagacagcgccttcagcatggaatccatcgacgacttcgtgaacgtgccagagtctggcgaatctgccgaagcctctctggacggctcccgggaattcgtgaatgtgtcccaagaactgcaccctggcgccgctaaaacagaacctgctgctctgtctagccaagaggccgaggaagtggaagaagaaggcgcccctgactacgagaacctgcaagagctgaacgggaattcctga

SEQ ID NO: 138 - DNA, 1533 bp, Artificial sequence
  Synthetic polynucleotide
atgcttctcctggtgacaagccttctgctctgtgagttaccacacccagcattcctcctgatcccagacatccagatgacacagactacatcctccctgtctgcctctctgggagacagagtcaccatcagttgcagggcaagtcaggacattagtaaatatttaaattggtatcagcagaaaccagatggaactgttaaactcctgatctaccatacatcaagattacactcaggagtcccatcaaggttcagtggcagtgggtctggaacagattattctctcaccattagcaacctggagcaagaagatattgccacttacttttgccaacagggtaatacgcttccgtacacgttcggaggggggactaagttggaaataacaggctccacctctggatccggcaagcccggatctggcgagggatccaccaagggcgaggtgaaactgcaggagtcaggacctggcctggtggcgccctcacagagcctgtccgtcacatgcactgtctcaggggtctcattacccgactatggtgtaagctggattcgccagcctccacgaaagggtctggagtggctgggagtaatatggggtagtgaaaccacatactataattcagctctcaaatccagactgaccatcatcaaggacaactccaagagccaagttttcttaaaaatgaacagtctgcaaactgatgacacagccatttactactgtgccaaacattattactacggtggtagctatgctatggactactggggtcaaggaacctcagtcaccgtctcctcagcggccgcaatcgaagtgatgtaccctccaccttacctggacaacgagaagtccaacggcaccatcatccacgtgaagggcaagcacctggctccttctccactgttccctggacctagcaagcctttctgggtgctcgtggttgttggcggcgtgctggccgcttattctctgctggtcaccgtggccttcatcatcttttgggtcggatcccactgtcacagactgcctggcagctacgatagcaccagcagcgacagcctgtatcctcggggcatccagttcaagaggcctcatacagttgccccttggcctcctgcctatcctcctgtgacaagctaccctccactgagccaacctgacctgctgcctattcctagatctcctcagcctctcggcggcagccacagaacacctagcagcagaagagatagcgacggcgccaatagcgtggcctcttatgagaatgagggcgcctctggcattagaggcgctcaagctggatggggagtttggggccctagctggacaagactgacacctgtgtctctgcctccagagcctgcctgtgaagatgccgacgaggacgaggatgactatcacaaccctggctacctggtggtgctgcctgatagcacaccagccacatctacagccgctccatctgctccagctctgagcacacctggcatcagagacagcgccttcagcatggaatccatcgacgactag

SEQ ID NO: 139 - DNA, 1731 bp, Artificial sequence
  Synthetic polynucleotide
atgcttctcctggtgacaagccttctgctctgtgagttaccacacccagcattcctcctgatcccagacatccagatgacacagactacatcctccctgtctgcctctctgggagacagagtcaccatcagttgcagggcaagtcaggacattagtaaatatttaaattggtatcagcagaaaccagatggaactgttaaactcctgatctaccatacatcaagattacactcaggagtcccatcaaggttcagtggcagtgggtctggaacagattattctctcaccattagcaacctggagcaagaagatattgccacttacttttgccaacagggtaatacgcttccgtacacgttcggaggggggactaagttggaaataacaggctccacctctggatccggcaagcccggatctggcgagggatccaccaagggcgaggtgaaactgcaggagtcaggacctggcctggtggcgccctcacagagcctgtccgtcacatgcactgtctcaggggtctcattacccgactatggtgtaagctggattcgccagcctccacgaaagggtctggagtggctgggagtaatatggggtagtgaaaccacatactataattcagctctcaaatccagactgaccatcatcaaggacaactccaagagccaagttttcttaaaaatgaacagtctgcaaactgatgacacagccatttactactgtgccaaacattattactacggtggtagctatgctatggactactggggtcaaggaacctcagtcaccgtctcctcagcggccgcaatcgaagtgatgtaccctccaccttacctggacaacgagaagtccaacggcaccatcatccacgtgaagggcaagcacctgtgtccttctccactgttccctggacctagcaagcctttctgggtgctcgtggttgttggcggcgtgctggcctgttattctctgctggtcaccgtggccttcatcatcttttgggtcggatcccactgtcacagactgcctggcagctacgatagcaccagcagcgacagcctgtatcctcggggcatccagttcaagaggcctcatacagttgccccttggcctcctgcctatcctcctgtgacaagctaccctccactgagccaacctgacctgctgcctattcctagatctcctcagcctctcggcggcagccacagaacacctagcagcagaagagatagcgacggcgccaatagcgtggcctcttatgagaatgagggcgcctctggcattagaggcgctcaagctggatggggagtttggggccctagctggacaagactgacacctgtgtctctgcctccagagcctgcctgtgaagatgccgacgaggacgaggatgactatcacaaccctggctacctggtggtgctgcctgatagcacaccagccacatctacagccgctccatctgctccagctctgagcacacctggcatcagagacagcgccttcagcatggaatccatcgacgacttcgtgaacgtgccagagtctggcgaatctgccgaagcctctctggacggctcccgggaattcgtgaatgtgtcccaagaactgcaccctggcgccgctaaaacagaacctgctgctctgtctagccaagaggccgaggaagtggaagaagaaggcgcccctgacttcgagaacctgcaagagctgaacgggaattcctga

SEQ ID NO: 140 - DNA, 2577 bp, Artificial sequence
  Synthetic polynucleotide
atggctcgctcggtgaccctggtctttctggtgcttgtctcactgaccggtttgtatgctgctgatatccagatgacccagtccccgagctccctgtccgcctctgtgggcgatagggtcaccatcacctgccgtgccagtcaggatgtgaatactgctgtagcctggtatcaacagaaaccaggaaaagctccgaaactactgatttactcggcatccttccttgagtctggagtcccttctcgcttctctggatctagatctgggacggatttcactctgaccatcagcagtctgcagccggaagacttcgcaacttattactgtcagcaacattatactactcctcccacgttcggacagggtaccaaggtggagatcaaagggtctacatctggatctgggaagccgggttctggtgagggttctggtgaggttcagctggtggagtctggcggtggcctggtgcagccagggggctcactccgtttgtcctgtgcagcttctggcttcaacattaaagacacctatatacactgggtgcgtcaggccccgggtaagggcctggaatgggttgcaaggatttatcctacgaatggttatactagatatgccgatagcgtcaagggccgtttcactataagcgcagacacatccaaaaacacagcctacctgcagatgaacagcctgcgtgctgaggacactgccgtctattattgttctagatggggaggggacggcttctatgctatggacgtgtggggtcaaggaaccctggtcaccgtctcctcggcggccgcaaccacgacgccagcgccgcgaccaccaacaccggcgcccaccatcgcgtcgcagcccctgtccctgcgcccagaggcgtgccggccagcggcggggggcgcagtgcacacgagggggctggacttcgcctgtgatatctacatctgggcgcccttggccgggacttgtggggtccttctcctgtcactggttatcaccctttactgcaaaggatccggcggtggtggatctgctctgagaaacgtgcccttcagatccgaggttctcggctgggaccctgatagcctggccgactacttcaagaagctgaactacaaggactgcgagaaggccgtgaagaagtaccatatcgacggcgccagattcctgaacctgaccgagaacgacatccagaagttccccaagctgagagtgcccatcctgagcaagctgagccaagagatcaacaagaacgaggaacggcggagcatcttcaccagaaagccccaggtgccaagattccccgaggaaacagagagccacgaggaagataacggcggctggtccagcttcgaagaggacgactacgagagccccaacgacgatcaggatggcgaggatgatggcgattacgagtcccctaacgaagaggaagaggcccctgttgaggacgacgccgattatgagcctcctcctagcaacgacgaagaagccctgcagaacagcatcctgcctgccaagccttttccaaacagcaacagcatgtacatcgaccggcctccaagcggcaaaacacctcagcaacctccagttcctcctcagcgacctatggctgcattgcctcctccaccagccggaagaaatcactctccactgcctccacctcagaccaatcacgaggaacccagcagaagcagacgatcactggccccatttgatagagagcccttcacactgggcaagaagcctccattcagcgacaagcctagcatccctgctggaagaagcctgggcgagcatctgcctaagatccagaaacctcctctgccacctaccaccgagagacacgagagatctagccctctgcctggcaagaaaccacctgtgcctaaacacggctggggcccagacagaagggaaaacgacgaggacgatgtgcaccagaggccattgcctcaacctgctctgctgcccatgtccagcaacacattccccagcaggtccaccaaaccttctccaatgaatcccctgcctagcagccacatgcctggcgcctttagcgagagcaatagcagctttcctcagagcgccagcctgcctccttactttagccagggacctagcaaccggccacctatcagagccgagggcagaaattttcccctgccactgcctaacaagcccagacctccatctcctgccgaggaagagaacagcctgaacgaagagtggtacgtgtcctacatcaccagacctgaagccgaggctgccctgagaaagatcaaccaggatggcacctttctcgtgcgggacagcagcaaaaagaccaccaccaatccttacgtgctgatggtgctgtacaaggacaaggtgtacaacatccagatccgctaccagaaagaaagccaggtgtacctgctcggcaccggcctgagaggcaaagaggattttctgagcgtcagcgacatcatcgactactttagaaagatgcccctgctgctgatcgacggcaagaacagaggcagcagataccagtgcacactgacacacgctgccggctatcccgggaattcctga

SEQ ID NO: 141 - protein, 2565 aa, Artificial sequence
  Synthetic polynucleotide
ATGGCTCGCTCGGTGACCCTGGTCTTTCTGGTGCTTGTCTCACTGACCGGTTTGTATGCTGCTGATATCCAGATGACCCAGTCCCCGAGCTCCCTGTCCGCCTCTGTGGGCGATAGGGTCACCATCACCTGCCGTGCCAGTCAGGATGTGAATACTGCTGTAGCCTGGTATCAACAGAAACCAGGAAAAGCTCCGAAACTACTGATTTACTCGGCATCCTTCCTTGAGTCTGGAGTCCCTTCTCGCTTCTCTGGATCTAGATCTGGGACGGATTTCACTCTGACCATCAGCAGTCTGCAGCCGGAAGACTTCGCAACTTATTACTGTCAGCAACATTATACTACTCCTCCCACGTTCGGACAGGGTACCAAGGTGGAGATCAAAGGGTCTACATCTGGATCTGGGAAGCCGGGTTCTGGTGAGGGTTCTGGTGAGGTTCAGCTGGTGGAGTCTGGCGGTGGCCTGGTGCAGCCAGGGGGCTCACTCCGTTTGTCCTGTGCAGCTTCTGGCTTCAACATTAAAGACACCTATATACACTGGGTGCGTCAGGCCCCGGGTAAGGGCCTGGAATGGGTTGCAAGGATTTATCCTACGAATGGTTATACTAGATATGCCGATAGCGTCAAGGGCCGTTTCACTATAAGCGCAGACACATCCAAAAACACAGCCTACCTGCAGATGAACAGCCTGCGTGCTGAGGACACTGCCGTCTATTATTGTTCTAGATGGGGAGGGGACGGCTTCTATGCTATGGACGTGTGGGGTCAAGGAACCCTGGTCACCGTCTCCTCGGCGGCCGCAATCGAAGTGATGTACCCTCCACCTTACCTGGACAACGAGAAGTCCAACGGCACCATCATCCACGTGAAGGGCAAGCACCTGTGTCCTTCTCCACTGTTCCCTGGACCTAGCAAGCCTTTCTGGGTGCTCGTGGTTGTTGGCGGCGTGCTGGCCTGTTATTCTCTGCTGGTCACCGTGGCCTTCATCATCTTTTGGGTCGGATCCGGCGGTGGTGGATCTGCTCTGAGAAACGTGCCCTTCAGATCCGAGGTTCTCGGCTGGGACCCTGATAGCCTGGCCGACTACTTCAAGAAGCTGAACTACAAGGACTGCGAGAAGGCCGTGAAGAAGTACCATATCGACGGCGCCAGATTCCTGAACCTGACCGAGAACGACATCCAGAAGTTCCCCAAGCTGAGAGTGCCCATCCTGAGCAAGCTGAGCCAAGAGATCAACAAGAACGAGGAACGGCGGAGCATCTTCACCAGAAAGCCCCAGGTGCCAAGATTCCCCGAGGAAACAGAGAGCCACGAGGAAGATAACGGCGGCTGGTCCAGCTTCGAAGAGGACGACTACGAGAGCCCCAACGACGATCAGGATGGCGAGGATGATGGCGATTACGAGTCCCCTAACGAAGAGGAAGAGGCCCCTGTTGAGGACGACGCCGATTATGAGCCTCCTCCTAGCAACGACGAAGAAGCCCTGCAGAACAGCATCCTGCCTGCCAAGCCTTTTCCAAACAGCAACAGCATGTACATCGACCGGCCTCCAAGCGGCAAAACACCTCAGCAACCTCCAGTTCCTCCTCAGCGACCTATGGCTGCATTGCCTCCTCCACCAGCCGGAAGAAATCACTCTCCACTGCCTCCACCTCAGACCAATCACGAGGAACCCAGCAGAAGCAGACGATCACTGGCCCCATTTGATAGAGAGCCCTTCACACTGGGCAAGAAGCCTCCATTCAGCGACAAGCCTAGCATCCCTGCTGGAAGAAGCCTGGGCGAGCATCTGCCTAAGATCCAGAAACCTCCTCTGCCACCTACCACCGAGAGACACGAGAGATCTAGCCCTCTGCCTGGCAAGAAACCACCTGTGCCTAAACACGGCTGGGGCCCAGACAGAAGGGAAAACGACGAGGACGATGTGCACCAGAGGCCATTGCCTCAACCTGCTCTGCTGCCCATGTCCAGCAACACATTCCCCAGCAGGTCCACCAAACCTTCTCCAATGAATCCCCTGCCTAGCAGCCACATGCCTGGCGCCTTTAGCGAGAGCAATAGCAGCTTTCCTCAGAGCGCCAGCCTGCCTCCTTACTTTAGCCAGGGACCTAGCAACCGGCCACCTATCAGAGCCGAGGGCAGAAATTTTCCCCTGCCACTGCCTAACAAGCCCAGACCTCCATCTCCTGCCGAGGAAGAGAACAGCCTGAACGAAGAGTGGTACGTGTCCTACATCACCAGACCTGAAGCCGAGGCTGCCCTGAGAAAGATCAACCAGGATGGCACCTTTCTCGTGCGGGACAGCAGCAAAAAGACCACCACCAATCCTTACGTGCTGATGGTGCTGTACAAGGACAAGGTGTACAACATCCAGATCCGCTACCAGAAAGAAAGCCAGGTGTACCTGCTCGGCACCGGCCTGAGAGGCAAAGAGGATTTTCTGAGCGTCAGCGACATCATCGACTACTTTAGAAAGATGCCCCTGCTGCTGATCGACGGCAAGAACAGAGGCAGCAGATACCAGTGCACACTGACACACGCTGCCGGCTATCCCGGGAATTCCTGA

SEQ ID NO: 142 - protein, 2073 aa, Artificial sequence
  Synthetic polynucleotide
ATGGTTGCCACCCTGCTCGTGACAAGCCTGCTGCTGTGCGAGCTGCCCCACCCTGCCTTTCTGCTGATCCCCGATACCGAGGTGCAGCTGGTGGAATCTGGCGGCGGACTGGTGCAGCCTGGCGGATCTCTGAGACTGAGCTGTGCCGCCAGCGGCTTCACCTTCAGCAGCTTCGGAATGCACTGGGTGCGCCAGGCCCCTGGCAAAGGACTGGAATGGGTGGCCTACATCAGCAGCGACAGCAGCGCCATCTACTACGCCGACACCGTGAAGGGCCGGTTCACCATCTCCCGGGACAACGCCAAGAACAGCCTGTACCTGCAGATGAACTCCCTGCGGGACGAGGACACCGCCGTGTACTATTGCGGCAGAGGCAGAGAGAACATCTATTACGGCAGCAGACTGGACTACTGGGGCCAGGGCACAACCGTGACAGTGTCTAGCGGAGGCGGAGGATCAGGCGGCGGAGGAAGTGGCGGAGGGGGATCTGATATCCAGCTGACCCAGAGCCCCAGCTTCCTGAGCGCCTCTGTGGGCGACAGAGTGACCATCACATGCAAGGCCAGCCAGAACGTGGACACCAACGTGGCCTGGTATCAGCAGAAGCCCGGCAAGGCCCCTAAGGCCCTGATCTACAGCGCCAGCTACCGGTACAGCGGCGTGCCCAGCAGATTTTCTGGCAGCGGCTCCGGCACCGACTTCACCCTGACAATCAGCAGCCTGCAGCCCGAGGACTTCGCCACCTACTACTGCCAGCAGTACAACAACTACCCTTTCACCTTCGGCCAGGGGACCAAGCTGGAAATCAAAGCGGCCGCAATCGAAGTGATGTACCCTCCACCTTACCTGGACAACGAGAAGTCCAACGGCACCATCATCCACGTGAAGGGCAAGCACCTGTGTCCTTCTCCACTGTTCCCTGGACCTAGCAAGCCTTTCTGGGTGCTCGTGGTTGTTGGCGGCGTGCTGGCCTGTTATTCTCTGCTGGTCACCGTGGCCTTCATCATCTTTTGGGTCGGATCCCCTAACAGCAGCGCCTCTAATGCTAGCGGAGCTGCTGCTCCTACACTGCCTGCTCACCCTTCTACACTGACACACCCTCAGCGGCGGATCGATACACTGAACTCTGATGGCTTCACCCCTGAGCCAGCCAGAATCACAAGCCCCGACAAGCCCAGACCTATGCCTATGGATACCAGCGTGTACGAGAGCCCCTACAGCGACCCTGAGGAACTGAAGGACAAGAAGCTGTTCCTGAAGCGGGACAACCTGCTGATTGCCGACATCGAACTCGGCTGCGGCAATTTTGGCTCTGTCAGACAGGGCGTGTACCGGATGCGGAAGAAACAGATCGACGTGGCCATCAAGGTGCTGAAGCAGGGAACCGAGAAGGCCGATACCGAGGAAATGATGCGCGAGGCCCAGATCATGCACCAGCTGGACAATCCTTACATCGTGCGGCTGATCGGCGTGTGTCAAGCCGAAGCTCTGATGCTGGTTATGGAAATGGCAGGCGGCGGACCCCTGCACAAGTTTCTCGTTGGCAAGAGAGAGGAAATCCCCGTCAGCAACGTGGCCGAACTGCTGCACCAAGTGTCTATGGGCATGAAGTACCTGGAAGAGAAGAACTTCGTGCACCGCGACCTGGCCGCCAGAAATGTGCTGCTGGTCAACAGACACTACGCCAAGATCAGCGACTTCGGCCTGTCTAAAGCCCTGGGCGCCGACGATAGCTACTACACAGCCAGATCTGCCGGAAAGTGGCCCCTGAAGTGGTACGCCCCTGAGTGCATCAACTTCAGAAAGTTCAGCAGCCGCAGCGACGTGTGGTCTTACGGCGTTACAATGTGGGAAGCCCTGAGCTACGGCCAGAAACCTTACAAGAAGATGAAGGGCCCCGAAGTCATGGCCTTCATCGAACAGGGCAAGAGAATGGAATGCCCTCCTGAGTGCCCTCCAGAGCTGTATGCCCTGATGAGCGACTGCTGGATCTATAAGTGGGAAGATCGGCCCGACTTCCTGACCGTGGAACAGAGAATGAGAGCCTGCTACTACAGCCTGGGGAATTCCTGA

SEQ ID NO: 143 - protein, 2073 aa, Artificial sequence
  Synthetic polynucleotide
ATGGTTGCCACCCTGCTCGTGACAAGCCTGCTGCTGTGCGAGCTGCCCCACCCTGCCTTTCTGCTGATCCCCGATACCGAGGTGCAGCTGGTGGAATCTGGCGGCGGACTGGTGCAGCCTGGCGGATCTCTGAGACTGAGCTGTGCCGCCAGCGGCTTCACCTTCAGCAGCTTCGGAATGCACTGGGTGCGCCAGGCCCCTGGCAAAGGACTGGAATGGGTGGCCTACATCAGCAGCGACAGCAGCGCCATCTACTACGCCGACACCGTGAAGGGCCGGTTCACCATCTCCCGGGACAACGCCAAGAACAGCCTGTACCTGCAGATGAACTCCCTGCGGGACGAGGACACCGCCGTGTACTATTGCGGCAGAGGCAGAGAGAACATCTATTACGGCAGCAGACTGGACTACTGGGGCCAGGGCACAACCGTGACAGTGTCTAGCGGAGGCGGAGGATCAGGCGGCGGAGGAAGTGGCGGAGGGGGATCTGATATCCAGCTGACCCAGAGCCCCAGCTTCCTGAGCGCCTCTGTGGGCGACAGAGTGACCATCACATGCAAGGCCAGCCAGAACGTGGACACCAACGTGGCCTGGTATCAGCAGAAGCCCGGCAAGGCCCCTAAGGCCCTGATCTACAGCGCCAGCTACCGGTACAGCGGCGTGCCCAGCAGATTTTCTGGCAGCGGCTCCGGCACCGACTTCACCCTGACAATCAGCAGCCTGCAGCCCGAGGACTTCGCCACCTACTACTGCCAGCAGTACAACAACTACCCTTTCACCTTCGGCCAGGGGACCAAGCTGGAAATCAAAGCGGCCGCAATCGAAGTGATGTACCCTCCACCTTACCTGGACAACGAGAAGTCCAACGGCACCATCATCCACGTGAAGGGCAAGCACCTGTGTCCTTCTCCACTGTTCCCTGGACCTAGCAAGCCTTTCTGGGTGCTCGTGGTTGTTGGCGGCGTGCTGGCCTGTTATTCTCTGCTGGTCACCGTGGCCTTCATCATCTTTTGGGTCGGATCCCCTAACAGCAGCGCCTCTAATGCTAGCGGAGCTGCTGCTCCTACACTGCCTGCTCACCCTTCTACACTGACACACCCTCAGCGGCGGATCGATACACTGAACTCTGATGGCTACACCCCTGAGCCAGCCAGAATCACAAGCCCCGACAAGCCCAGACCTATGCCTATGGATACCAGCGTGTACGAGAGCCCCTACAGCGACCCTGAGGAACTGAAGGACAAGAAGCTGTTCCTGAAGCGGGACAACCTGCTGATTGCCGACATCGAACTCGGCTGCGGCAATTTTGGCTCTGTCAGACAGGGCGTGTACCGGATGCGGAAGAAACAGATCGACGTGGCCATCAAGGTGCTGAAGCAGGGAACCGAGAAGGCCGATACCGAGGAAATGATGCGCGAGGCCCAGATCATGCACCAGCTGGACAATCCTTACATCGTGCGGCTGATCGGCGTGTGTCAAGCCGAAGCTCTGATGCTGGTTATGGAAATGGCAGGCGGCGGACCCCTGCACAAGTTTCTCGTTGGCAAGAGAGAGGAAATCCCCGTCAGCAACGTGGCCGAACTGCTGCACCAAGTGTCTATGGGCATGAAGTACCTGGAAGAGAAGAACTTCGTGCACCGCGACCTGGCCGCCAGAAATGTGCTGCTGGTCAACAGACACTACGCCAAGATCAGCGACTTCGGCCTGTCTAAAGCCCTGGGCGCCGACGATAGCTTCTACACAGCCAGATCTGCCGGAAAGTGGCCCCTGAAGTGGTACGCCCCTGAGTGCATCAACTTCAGAAAGTTCAGCAGCCGCAGCGACGTGTGGTCTTACGGCGTTACAATGTGGGAAGCCCTGAGCTACGGCCAGAAACCTTACAAGAAGATGAAGGGCCCCGAAGTCATGGCCTTCATCGAACAGGGCAAGAGAATGGAATGCCCTCCTGAGTGCCCTCCAGAGCTGTATGCCCTGATGAGCGACTGCTGGATCTATAAGTGGGAAGATCGGCCCGACTTCCTGACCGTGGAACAGAGAATGAGAGCCTGCTACTACAGCCTGGGGAATTCCTGA

SEQ ID NO: 144 - DNA, 2073 bp, Artificial sequence
  Synthetic polynucleotide
atggttgccaccctgctcgtgacaagcctgctgctgtgcgagctgccccaccctgcctttctgctgatccccgataccgaggtgcagctggtggaatctggcggcggactggtgcagcctggcggatctctgagactgagctgtgccgccagcggcttcaccttcagcagcttcggaatgcactgggtgcgccaggcccctggcaaaggactggaatgggtggcctacatcagcagcgacagcagcgccatctactacgccgacaccgtgaagggccggttcaccatctcccgggacaacgccaagaacagcctgtacctgcagatgaactccctgcgggacgaggacaccgccgtgtactattgcggcagaggcagagagaacatctattacggcagcagactggactactggggccagggcacaaccgtgacagtgtctagcggaggcggaggatcaggcggcggaggaagtggcggagggggatctgatatccagctgacccagagccccagcttcctgagcgcctctgtgggcgacagagtgaccatcacatgcaaggccagccagaacgtggacaccaacgtggcctggtatcagcagaagcccggcaaggcccctaaggccctgatctacagcgccagctaccggtacagcggcgtgcccagcagattttctggcagcggctccggcaccgacttcaccctgacaatcagcagcctgcagcccgaggacttcgccacctactactgccagcagtacaacaactaccctttcaccttcggccaggggaccaagctggaaatcaaagcggccgcaatcgaagtgatgtaccctccaccttacctggacaacgagaagtccaacggcaccatcatccacgtgaagggcaagcacctgtgtccttctccactgttccctggacctagcaagcctttctgggtgctcgtggttgttggcggcgtgctggcctgttattctctgctggtcaccgtggccttcatcatcttttgggtcggatcccctaacagcagcgcctctaatgctagcggagctgctgctcctacactgcctgctcacccttctacactgacacaccctcagcggcggatcgatacactgaactctgatggctacacccctgagccagccagaatcacaagccccgacaagcccagacctatgcctatggataccagcgtgtacgagagcccctacagcgaccctgaggaactgaaggacaagaagctgttcctgaagcgggacaacctgctgattgccgacatcgaactcggctgcggcaattttggctctgtcagacagggcgtgtaccggatgcggaagaaacagatcgacgtggccatcaaggtgctgaagcagggaaccgagaaggccgataccgaggaaatgatgcgcgaggcccagatcatgcaccagctggacaatccttacatcgtgcggctgatcggcgtgtgtcaagccgaagctctgatgctggttatggaaatggcaggcggcggacccctgcacaagtttctcgttggcaagagagaggaaatccccgtcagcaacgtggccgaactgctgcaccaagtgtctatgggcatgaagtacctggaagagaagaacttcgtgcaccgcgacctggccgccagaaatgtgctgctggtcaacagacactacgccaagatcagcgacttcggcctgtctaaagccctgggcgccgacgatagctactacacagccagatctgccggaaagtggcccctgaagtggtacgcccctgagtgcatcaacttcagaaagttcagcagccgcagcgacgtgtggtcttacggcgttacaatgtgggaagccctgagctacggccagaaaccttacaagaagatgaggggccccgaagtcatggccttcatcgaacagggcaagagaatggaatgccctcctgagtgccctccagagctgtatgccctgatgagcgactgctggatctataagtgggaagatcggcccgacttcctgaccgtggaacagagaatgagagcctgctactacagcctggggaattcctga

SEQ ID NO: 145 - DNA, 2073 bp, Artificial sequence
  Synthetic polynucleotide
atggttgccaccctgctcgtgacaagcctgctgctgtgcgagctgccccaccctgcctttctgctgatccccgataccgaggtgcagctggtggaatctggcggcggactggtgcagcctggcggatctctgagactgagctgtgccgccagcggcttcaccttcagcagcttcggaatgcactgggtgcgccaggcccctggcaaaggactggaatgggtggcctacatcagcagcgacagcagcgccatctactacgccgacaccgtgaagggccggttcaccatctcccgggacaacgccaagaacagcctgtacctgcagatgaactccctgcgggacgaggacaccgccgtgtactattgcggcagaggcagagagaacatctattacggcagcagactggactactggggccagggcacaaccgtgacagtgtctagcggaggcggaggatcaggcggcggaggaagtggcggagggggatctgatatccagctgacccagagccccagcttcctgagcgcctctgtgggcgacagagtgaccatcacatgcaaggccagccagaacgtggacaccaacgtggcctggtatcagcagaagcccggcaaggcccctaaggccctgatctacagcgccagctaccggtacagcggcgtgcccagcagattttctggcagcggctccggcaccgacttcaccctgacaatcagcagcctgcagcccgaggacttcgccacctactactgccagcagtacaacaactaccctttcaccttcggccaggggaccaagctggaaatcaaagcggccgcaatcgaagtgatgtaccctccaccttacctggacaacgagaagtccaacggcaccatcatccacgtgaagggcaagcacctgtgtccttctccactgttccctggacctagcaagcctttctgggtgctcgtggttgttggcggcgtgctggcctgttattctctgctggtcaccgtggccttcatcatcttttgggtcggatcccctaacagcagcgcctctaatgctagcggagctgctgctcctacactgcctgctcacccttctacactgacacaccctcagcggcggatcgatacactgaactctgatggctacacccctgagccagccagaatcacaagccccgacaagcccagacctatgcctatggataccagcgtgtacgagagcccctacagcgaccctgaggaactgaaggacaagaagctgttcctgaagcgggacaacctgctgattgccgacatcgaactcggctgcggcaattttggctctgtcagacagggcgtgtaccggatgcggaagaaacagatcgacgtggccatcaaggtgctgaagcagggaaccgagaaggccgataccgaggaaatgatgcgcgaggcccagatcatgcaccagctggacaatccttacatcgtgcggctgatcggcgtgtgtcaagccgaagctctgatgctggttatggaaatggcaggcggcggacccctgcacaagtttctcgttggcaagagagaggaaatccccgtcagcaacgtggccgaactgctgcaccaagtgtctatgggcatgaagtacctggaagagaagaacttcgtgcaccgcgacctggccgccagaaatgtgctgctggtcaacagacactacgccaagatcagcgacttcggcctgtctaaagccctgggcgccgacgatagctactacacagccagatctgccggaaagtggcccctgaagtggtacgcccctgagtgcatcaacttcagaaagttcagcagccgcagcgacgtgtggtcttacggcgttacaatgtgggaagccctgagctacggccagaaaccttacaagaagatgaagggccccgaagtcatggccttcatcgaacagggcaagagaatggaatgccctcctgagtgccctccagagctgtatgccctgatgagcgactgctggatctataagtgggaagatcggcccgacttcctgaccgtggaacagagaatgagagcctgcttcttcagcctggggaattcctga

SEQ ID NO: 146 - protein, 42 aa, Artificial sequence
  Synthetic polypeptide
KRGRKKLLYIFKQPFMRPVQTTQEEDGCSCRFPEEEEGGCEL

SEQ ID NO: 147 - protein, 41 aa, Artificial sequence; identical to SEQ ID NO: 25
  Synthetic polypeptide

SEQ ID NO: 148 - protein, 732 aa, Artificial sequence
  Synthetic polypeptide
MVATLLVTSLLLCELPHPAFLLIPDTEVQLVESGGGLVQPGGSLRLSCAASGFTFSSFGMHWVRQAPGKGLEWVAYISSDSSAIYYADTVKGRFTISRDNAKNSLYLQMNSLRDEDTAVYYCGRGRENIYYGSRLDYWGQGTTVTVSSGGGGSGGGGSGGGGSDIQLTQSPSFLSASVGDRVTITCKASQNVDTNVAWYQQKPGKAPKALIYSASYRYSGVPSRFSGSGSGTDFTLTISSLQPEDFATYYCQQYNNYPFTFGQGTKLEIKAAAIEVMYPPPYLDNEKSNGTIIHVKGKHLCPSPLFPGPSKPFWVLVVVGGVLACYSLLVTVAFIIFWVKRGRKKLLYIFKQPFMRPVQTTQEEDGCSCRFPEEEEGGCELGSPNSSASNASGAAAPTLPAHPSTLTHPQRRIDTLNSDGYTPEPARITSPDKPRPMPMDTSVYESPYSDPEELKDKKLFLKRDNLLIADIELGCGNFGSVRQGVYRMRKKQIDVAIKVLKQGTEKADTEEMMREAQIMHQLDNPYIVRLIGVCQAEALMLVMEMAGGGPLHKFLVGKREEIPVSNVAELLHQVSMGMKYLEEKNFVHRDLAARNVLLVNRHYAKISDFGLSKALGADDSYYTARSAGKWPLKWYAPECINFRKFSSRSDVWSYGVTMWEALSYGQKPYKKMKGPEVMAFIEQGKRMECPPECPPELYALMSDCWIYKWEDRPDFLTVEQRMRACYYSLGNS

SEQ ID NO: 149 - protein, 731 aa, Artificial sequence
  Synthetic polypeptide
MVATLLVTSLLLCELPHPAFLLIPDTEVQLVESGGGLVQPGGSLRLSCAASGFTFSSFGMHWVRQAPGKGLEWVAYISSDSSAIYYADTVKGRFTISRDNAKNSLYLQMNSLRDEDTAVYYCGRGRENIYYGSRLDYWGQGTTVTVSSGGGGSGGGGSGGGGSDIQLTQSPSFLSASVGDRVTITCKASQNVDTNVAWYQQKPGKAPKALIYSASYRYSGVPSRFSGSGSGTDFTLTISSLQPEDFATYYCQQYNNYPFTFGQGTKLEIKAAAIEVMYPPPYLDNEKSNGTIIHVKGKHLCPSPLFPGPSKPFWVLVVVGGVLACYSLLVTVAFIIFWVRSKRSRLLHSDYMNMTPRRPGPTRKHYQPYAPPRDFAAYRSGSPNSSASNASGAAAPTLPAHPSTLTHPQRRIDTLNSDGYTPEPARITSPDKPRPMPMDTSVYESPYSDPEELKDKKLFLKRDNLLIADIELGCGNFGSVRQGVYRMRKKQIDVAIKVLKQGTEKADTEEMMREAQIMHQLDNPYIVRLIGVCQAEALMLVMEMAGGGPLHKFLVGKREEIPVSNVAELLHQVSMGMKYLEEKNFVHRDLAARNVLLVNRHYAKISDFGLSKALGADDSYYTARSAGKWPLKWYAPECINFRKFSSRSDVWSYGVTMWEALSYGQKPYKKMKGPEVMAFIEQGKRMECPPECPPELYALMSDCWIYKWEDRPDFLTVEQRMRACYYSLGNS

SEQ ID NO: 150 - protein, 687 aa, Artificial sequence
  Synthetic polypeptide
MLLLVTSLLLCELPHPAFLLIPDIQMTQTTSSLSASLGDRVTISCRASQDISKYLNWYQQKPDGTVKLLIYHTSRLHSGVPSRFSGSGSGTDYSLTISNLEQEDIATYFCQQGNTLPYTFGGGTKLEITGSTSGSGKPGSGEGSTKGEVKLQESGPGLVAPSQSLSVTCTVSGVSLPDYGVSWIRQPPRKGLEWLGVIWGSETTYYNSALKSRLTIIKDNSKSQVFLKMNSLQTDDTAIYYCAKHYYYGGSYAMDYWGQGTSVTVSSAAAIEVMYPPPYLDNEKSNGTIIHVKGKHLCPSPLFPGPSKPFWVLVVVGGVLACYSLLVTVAFIIFWVGSPNSSASNASGAAAPTLPAHPSTLTHPQRRIDTLNSDGYTPEPARITSPDKPRPMPMDTSVYESPYSDPEELKDKKLFLKRDNLLIADIELGCGNFGSVRQGVYRMRKKQIDVAIKVLKQGTEKADTEEMMREAQIMHQLDNPYIVRLIGVCQAEALMLVMEMAGGGPLHKFLVGKREEIPVSNVAELLHQVSMGMKYLEEKNFVHRDLAARNVLLVNRHYAKISDFGLSKALGADDSYYTARSAGKWPLKWYAPECINFRKFSSRSDVWSYGVTMWEALSYGQKPYKKMKGPEVMAFIEQGKRMECPPECPPELYALMSDCWIYKWEDRPDFLTVEQRMRACYYSLGNS

SEQ ID NO: 151 - protein, 1630 aa, Artificial sequence
  Synthetic polypeptide
MLLLVTSLLLCELPHPAFLLIPDIQMTQTTSSLSASLGDRVTISCRASQDISKYLNWYQQKPDGTVKLLIYHTSRLHSGVPSRFSGSGSGTDYSLTISNLEQEDIATYFCQQGNTLPYTFGGGTKLEITGSTSGSGKPGSGEGSTKGEVKLQESGPGLVAPSQSLSVTCTVSGVSLPDYGVSWIRQPPRKGLEWLGVIWGSETTYYNSALKSRLTIIKDNSKSQVFLKMNSLQTDDTAIYYCAKHYYYGGSYAMDYWGQGTSVTVSSAAAIEVMYPPPYLDNEKSNGTIIHVKGKHLCPSPLFPGPSKPFWVLVVVGGVLACYSLLVTVAFIIFWVGGGGSAGAASPCANGCGPGAPSDAEVLHLCRSLEVGTVMTLFYSKKSQRPERKTFQVKLETRQITWSRGADKIEGAIDIREIKEIRPGKTSRDFDRYQEDPAFRPDQSHCFVILYGMEFRLKTLSLQATSEDEVNMWIKGLTWLMEDTLQAPTPLQIERWLRKQFYSVDRNREDRISAKDLKNMLSQVNYRVPNMRFLRERLTDLEQRSGDITYGQFAQLYRSLMYSAQKTMDLPFLEASTLRAGERPELCRVSLPEFQQFLLDYQGELWAVDRLQVQEFMLSFLRDPLREIEEPYFFLDEFVTFLFSKENSVWNSQLDAVCPDTMNNPLSHYWISSSHNTYLTGDQFSSESSLEAYARCLRMGCRCIELDCWDGPDGMPVIYHGHTLTTKIKFSDVLHTIKEHAFVASEYPVILSIEDHCSIAQQRNMAQYFKKVLGDTLLTKPVEISADGLPSPNQLKRKILIKHKKLAEGSAYEEVPTSMMYSENDISNSIKNGILYLEDPVNHEWYPHYFVLTSSKIYYSEETSSDQGNEDEEEPKEVSSSTELHSNEKWFHGKLGAGRDGRHIAERLLTEYCIETGAPDGSFLVRESETFVGDYTLSFWRNGKVQHCRIHSRQDAGTPKFFLTDNLVFDSLYDLITHYQQVPLRCNEFEMRLSEPVPQTNAHESKEWYHASLTRAQAEHMLMRVPRDGAFLVRKRNEPNSYAISFRAEGKIKHCRVQQEGQTVMLGNSEFDSLVDLISYYEKHPLYRKMKLRYPINEEALEKIGTAEPDYGALYEGRNPGFYVEANPMPTFKCAVKALFDYKAQREDELTFIKSAIIQNVEKQEGGWWRGDYGGKKQLWFPSNYVEEMVNPVALEPEREHLDENSPLGDLLRGVLDVPACQIAIRPEGKNNRLFVFSISMASVAHWSLDVAADSQEELQDWVKKIREVAQTADARLTEGKIMERRKKIALELSELVVYCRPVPFDEEKIGTERACYRDMSSFPETKAEKYVNKAKGKKFLQYNRLQLSRIYPKGQRLDSSNYDPLPMWICGSQLVALNFQTPDKPMQMNQALFMTGRHCGYVLQPSTMRDEAFDPFDKSSLRGLEPCAISIEVLGARHLPKNGRGIVCPFVEIEVAGAEYDSTKQKTEFVVDNGLNPVWPAKPFHFQISNPEFAFLRFVVYEEDMFSDQNFLAQATFPVKGLKTGYRAVPLKNNYSEDLELASLLIKIDIFPAKENGDLSPFSGTSLRERGSDASGQLFHGRAREGSFESRYQQPFEDFRISQEHLADHFDSRERRAPRRTRVNGDNRL

SEQ ID NO: 152 - DNA, 801 bp, Artificial sequence
  Synthetic polynucleotide
atgctgctgctcgtgacatctctgctgctgtgcgagctgccccaccccgcctttctgctgatccccgacatccagatgacccagaccaccagcagcctgagcgccagcctgggcgatagagtgaccatcagctgcagagccagccaggacatcagcaagtacctgaactggtatcagcagaaacccgacggcaccgtgaagctgctgatctaccacaccagcagactgcacagcggcgtgcccagcagattttctggcagcggctccggcaccgactacagcctgaccatctccaacctggaacaggaagatatcgctacctacttctgtcagcaaggcaacaccctgccctacaccttcggcggaggcaccaagctggaaatcaccggcagcacaagcggcagcggcaagcctggatctggcgagggaagcaccaagggcgaagtgaaactgcaggaaagcggccctggactggtggccccaagccagtctctgagcgtgacctgtaccgtgtccggcgtgtccctgcctgactatggcgtgtcctggatcagacagccccccagaaagggcctggaatggctgggagtgatctggggcagcgagacaacctactacaacagcgccctgaagtcccggctgaccatcatcaaggacaactccaagagccaggtgttcctgaagatgaacagcctgcagaccgacgacaccgccatctactactgcgccaagcactactactacggcggcagctacgctatggactactggggccagggcaccagcgtgaccgtgtcatct

SEQ ID NO: 153 - DNA, 207 bp, Artificial sequence
  Synthetic polynucleotide
gcggccgcaatcgaagtgatgtaccctcctccttacctggacaacgagaagtccaacggcaccatcatccacgtgaagggcaagcacctgtgtccttctccactgttccctggacctagcaagcctttctgggtgctcgtggttgttggcggcgtgctggcctgttattctctgctggtcaccgtggccttcatcatcttttgggtc

SEQ ID NO: 154 - DNA, 126 bp, Artificial sequence
  Synthetic polynucleotide
aagcggggcagaaagaagctgctgtacatcttcaagcagcccttcatgcggcccgtgcagaccacacaagaggaagatggctgctcctgcagattccccgaggaagaagaaggcggctgcgagctg

SEQ ID NO: 155 - DNA, 123 bp, Artificial sequence
  Synthetic polynucleotide
aggagtaagaggagcaggctcctgcacagtgactacatgaacatgactccccgccgccccgggcccacccgcaagcattaccagccctatgccccaccacgcgacttcgcagcctatcgctcc

SEQ ID NO: 156 - DNA, 1056 bp, Artificial sequence
  Synthetic polynucleotide
ggctctcctaattcttctgcctctaatgcctctggcgccgctgctcctacactgcctgctcatccttctacactgacacaccctcagcggcggatcgacacactgaatagcgacggctatacccctgagcctgccagaatcacaagccccgacaagcccagacctatgcctatggataccagcgtgtacgagagcccctacagcgaccctgaggaactgaaggacaagaagctgttcctgaagcgggacaacctgctgatcgccgatatcgaactcggctgcggcaattttggcagcgtcagacagggcgtgtaccggatgagaaagaaacagatcgacgtggccatcaaggtgctgaagcagggcacagagaaggccgacaccgaggaaatgatgcgcgaggcccagatcatgcaccagctggacaatccttacatcgtgcggctgatcggcgtgtgtcaggccgaagctctgatgctggttatggaaatggctggcggcggacccctgcacaagtttctcgttggcaagagagaggaaatccccgtcagcaacgtggccgagctgctgcatcaagtgtctatgggcatgaagtacctggaagagaagaacttcgtgcaccgcgacctggccgccagaaatgtgctgctcgtgaacagacactacgccaagatcagcgactttggcctgtctaaggccctgggcgccgacgatagctactatacagccagatctgccggcaagtggcccctgaagtggtacgcccctgagtgcatcaacttcagaaagttcagcagccgcagcgacgtgtggtcttacggcgttacaatgtgggaagccctgagctacggccagaaaccttacaagaagatgaagggcccagaagtgatggcctttatcgagcagggcaaaagaatggaatgccctcctgagtgccctccagagctgtacgcactgatgagcgactgctggatctataagtgggaagatcggcccgacttcctgaccgtggaacagagaatgagagcctgctactacagcctgggcaacagctga

SEQ ID NO: 157 - DNA, 2199 bp, Artificial sequence
  Synthetic polynucleotide
atggttgccaccctgctcgtgacaagcctgctgctgtgcgagctgccccaccctgcctttctgctgatccccgataccgaggtgcagctggtggaatctggcggcggactggtgcagcctggcggatctctgagactgagctgtgccgccagcggcttcaccttcagcagcttcggaatgcactgggtgcgccaggcccctggcaaaggactggaatgggtggcctacatcagcagcgacagcagcgccatctactacgccgacaccgtgaagggccggttcaccatctcccgggacaacgccaagaacagcctgtacctgcagatgaactccctgcgggacgaggacaccgccgtgtactattgcggcagaggcagagagaacatctattacggcagcagactggactactggggccagggcacaaccgtgacagtgtctagcggaggcggaggatcaggcggcggaggaagtggcggagggggatctgatatccagctgacccagagccccagcttcctgagcgcctctgtgggcgacagagtgaccatcacatgcaaggccagccagaacgtggacaccaacgtggcctggtatcagcagaagcccggcaaggcccctaaggccctgatctacagcgccagctaccggtacagcggcgtgcccagcagattttctggcagcggctccggcaccgacttcaccctgacaatcagcagcctgcagcccgaggacttcgccacctactactgccagcagtacaacaactaccctttcaccttcggccaggggaccaagctggaaatcaaagcggccgcaatcgaagtgatgtaccctcctccttacctggacaacgagaagtccaacggcaccatcatccacgtgaagggcaagcacctgtgtccttctccactgttccctggacctagcaagcctttctgggtgctcgtggttgttggcggcgtgctggcctgttattctctgctggtcaccgtggccttcatcatcttttgggtcaagcggggcagaaagaagctgctgtacatcttcaagcagcccttcatgcggcccgtgcagaccacacaagaggaagatggctgctcctgcagattccccgaggaagaagaaggcggctgcgagctgggctctcctaattcttctgcctctaatgcctctggcgccgctgctcctacactgcctgctcatccttctacactgacacaccctcagcggcggatcgacacactgaatagcgacggctatacccctgagcctgccagaatcacaagccccgacaagcccagacctatgcctatggataccagcgtgtacgagagcccctacagcgaccctgaggaactgaaggacaagaagctgttcctgaagcgggacaacctgctgatcgccgatatcgaactcggctgcggcaattttggcagcgtcagacagggcgtgtaccggatgagaaagaaacagatcgacgtggccatcaaggtgctgaagcagggcacagagaaggccgacaccgaggaaatgatgcgcgaggcccagatcatgcaccagctggacaatccttacatcgtgcggctgatcggcgtgtgtcaggccgaagctctgatgctggttatggaaatggctggcggcggacccctgcacaagtttctcgttggcaagagagaggaaatccccgtcagcaacgtggccgagctgctgcatcaagtgtctatgggcatgaagtacctggaagagaagaacttcgtgcaccgcgacctggccgccagaaatgtgctgctcgtgaacagacactacgccaagatcagcgactttggcctgtctaaggccctgggcgccgacgatagctactatacagccagatctgccggcaagtggcccctgaagtggtacgcccctgagtgcatcaacttcagaaagttcagcagccgcagcgacgtgtggtcttacggcgttacaatgtgggaagccctgagctacggccagaaaccttacaagaagatgaagggcccagaagtgatggcctttatcgagcagggcaaaagaatggaatgccctcctgagtgccctccagagctgtacgcactgatgagcgactgctggatctataagtgggaagatcggcccgacttcctgaccgtggaacagagaatgagagcctgctactacagcctgggcaacagctga

SEQ ID NO: 158 - DNA, 2196 bp, Artificial sequence
  Synthetic polynucleotide
atggttgccaccctgctcgtgacaagcctgctgctgtgcgagctgccccaccctgcctttctgctgatccccgataccgaggtgcagctggtggaatctggcggcggactggtgcagcctggcggatctctgagactgagctgtgccgccagcggcttcaccttcagcagcttcggaatgcactgggtgcgccaggcccctggcaaaggactggaatgggtggcctacatcagcagcgacagcagcgccatctactacgccgacaccgtgaagggccggttcaccatctcccgggacaacgccaagaacagcctgtacctgcagatgaactccctgcgggacgaggacaccgccgtgtactattgcggcagaggcagagagaacatctattacggcagcagactggactactggggccagggcacaaccgtgacagtgtctagcggaggcggaggatcaggcggcggaggaagtggcggagggggatctgatatccagctgacccagagccccagcttcctgagcgcctctgtgggcgacagagtgaccatcacatgcaaggccagccagaacgtggacaccaacgtggcctggtatcagcagaagcccggcaaggcccctaaggccctgatctacagcgccagctaccggtacagcggcgtgcccagcagattttctggcagcggctccggcaccgacttcaccctgacaatcagcagcctgcagcccgaggacttcgccacctactactgccagcagtacaacaactaccctttcaccttcggccaggggaccaagctggaaatcaaagcggccgcaattgaagttatgtatcctcctccttacctagacaatgagaagagcaatggaaccattatccatgtgaaagggaaacacctttgtccaagtcccctatttcccggaccttctaagcccttttgggtgctggtggtggttgggggagtcctggcttgctatagcttgctagtaacagtggcctttattattttctgggtgaggagtaagaggagcaggctcctgcacagtgactacatgaacatgactccccgccgccccgggcccacccgcaagcattaccagccctatgccccaccacgcgacttcgcagcctatcgctccggatcccctaacagcagcgcctctaatgctagcggagctgctgctcctacactgcctgctcacccttctacactgacacaccctcagcggcggatcgatacactgaactctgatggctacacccctgagccagccagaatcacaagccccgacaagcccagacctatgcctatggataccagcgtgtacgagagcccctacagcgaccctgaggaactgaaggacaagaagctgttcctgaagcgggacaacctgctgattgccgacatcgaactcggctgcggcaattttggctctgtcagacagggcgtgtaccggatgcggaagaaacagatcgacgtggccatcaaggtgctgaagcagggaaccgagaaggccgataccgaggaaatgatgcgcgaggcccagatcatgcaccagctggacaatccttacatcgtgcggctgatcggcgtgtgtcaagccgaagctctgatgctggttatggaaatggcaggcggcggacccctgcacaagtttctcgttggcaagagagaggaaatccccgtcagcaacgtggccgaactgctgcaccaagtgtctatgggcatgaagtacctggaagagaagaacttcgtgcaccgcgacctggccgccagaaatgtgctgctggtcaacagacactacgccaagatcagcgacttcggcctgtctaaagccctgggcgccgacgatagctactacacagccagatctgccggaaagtggcccctgaagtggtacgcccctgagtgcatcaacttcagaaagttcagcagccgcagcgacgtgtggtcttacggcgttacaatgtgggaagccctgagctacggccagaaaccttacaagaagatgaagggccccgaagtcatggccttcatcgaacagggcaagagaatggaatgccctcctgagtgccctccagagctgtatgccctgatgagcgactgctggatctataagtgggaagatcggcccgacttcctgaccgtggaacagagaatgagagcctgctactacagcctggggaattcctga

SEQ ID NO: 159 - DNA, 2064 bp, Artificial sequence
  Synthetic polynucleotide
atgctgctgctcgtgacatctctgctgctgtgcgagctgccccaccccgcctttctgctgatccccgacatccagatgacccagaccaccagcagcctgagcgccagcctgggcgatagagtgaccatcagctgcagagccagccaggacatcagcaagtacctgaactggtatcagcagaaacccgacggcaccgtgaagctgctgatctaccacaccagcagactgcacagcggcgtgcccagcagattttctggcagcggctccggcaccgactacagcctgaccatctccaacctggaacaggaagatatcgctacctacttctgtcagcaaggcaacaccctgccctacaccttcggcggaggcaccaagctggaaatcaccggcagcacaagcggcagcggcaagcctggatctggcgagggaagcaccaagggcgaagtgaaactgcaggaaagcggccctggactggtggccccaagccagtctctgagcgtgacctgtaccgtgtccggcgtgtccctgcctgactatggcgtgtcctggatcagacagccccccagaaagggcctggaatggctgggagtgatctggggcagcgagacaacctactacaacagcgccctgaagtcccggctgaccatcatcaaggacaactccaagagccaggtgttcctgaagatgaacagcctgcagaccgacgacaccgccatctactactgcgccaagcactactactacggcggcagctacgctatggactactggggccagggcaccagcgtgaccgtgtcatctgcggccgcaatcgaagtgatgtaccctccaccttacctggacaacgagaagtccaacggcaccatcatccacgtgaagggcaagcacctgtgtccttctccactgttccctggacctagcaagcctttctgggtgctcgtggttgttggcggcgtgctggcctgttattctctgctggtcaccgtggccttcatcatcttttgggtcggatcccctaacagcagcgcctctaatgctagcggagctgctgctcctacactgcctgctcacccttctacactgacacaccctcagcggcggatcgatacactgaactctgatggctacacccctgagccagccagaatcacaagccccgacaagcccagacctatgcctatggataccagcgtgtacgagagcccctacagcgaccctgaggaactgaaggacaagaagctgttcctgaagcgggacaacctgctgattgccgacatcgaactcggctgcggcaattttggctctgtcagacagggcgtgtaccggatgcggaagaaacagatcgacgtggccatcaaggtgctgaagcagggaaccgagaaggccgataccgaggaaatgatgcgcgaggcccagatcatgcaccagctggacaatccttacatcgtgcggctgatcggcgtgtgtcaagccgaagctctgatgctggttatggaaatggcaggcggcggacccctgcacaagtttctcgttggcaagagagaggaaatccccgtcagcaacgtggccgaactgctgcaccaagtgtctatgggcatgaagtacctggaagagaagaacttcgtgcaccgcgacctggccgccagaaatgtgctgctggtcaacagacactacgccaagatcagcgacttcggcctgtctaaagccctgggcgccgacgatagctactacacagccagatctgccggaaagtggcccctgaagtggtacgcccctgagtgcatcaacttcagaaagttcagcagccgcagcgacgtgtggtcttacggcgttacaatgtgggaagccctgagctacggccagaaaccttacaagaagatgaagggccccgaagtcatggccttcatcgaacagggcaagagaatggaatgccctcctgagtgccctccagagctgtatgccctgatgagcgactgctggatctataagtgggaagatcggcccgacttcctgaccgtggaacagagaatgagagcctgctactacagcctggggaattcctga

SEQ ID NO: 160 - DNA, 4893 bp, Artificial sequence
  Synthetic polynucleotide
atgctgctgctcgtgacatctctgctgctgtgcgagctgccccaccccgcctttctgctgatccccgacatccagatgacccagaccaccagcagcctgagcgccagcctgggcgatagagtgaccatcagctgcagagccagccaggacatcagcaagtacctgaactggtatcagcagaaacccgacggcaccgtgaagctgctgatctaccacaccagcagactgcacagcggcgtgcccagcagattttctggcagcggctccggcaccgactacagcctgaccatctccaacctggaacaggaagatatcgctacctacttctgtcagcaaggcaacaccctgccctacaccttcggcggaggcaccaagctggaaatcaccggcagcacaagcggcagcggcaagcctggatctggcgagggaagcaccaagggcgaagtgaaactgcaggaaagcggccctggactggtggccccaagccagtctctgagcgtgacctgtaccgtgtccggcgtgtccctgcctgactatggcgtgtcctggatcagacagccccccagaaagggcctggaatggctgggagtgatctggggcagcgagacaacctactacaacagcgccctgaagtcccggctgaccatcatcaaggacaactccaagagccaggtgttcctgaagatgaacagcctgcagaccgacgacaccgccatctactactgcgccaagcactactactacggcggcagctacgctatggactactggggccagggcaccagcgtgaccgtgtcatctgcggccgcaatcgaagtgatgtaccctccaccttacctggacaacgagaagtccaacggcaccatcatccacgtgaagggcaagcacctgtgtccttctccactgttccctggacctagcaagcctttctgggtgctcgtggttgttggcggcgtgctggcctgttattctctgctggtcaccgtggccttcatcatcttttgggtcggaggcggaggaagcgctggcgctgcttctccttgtgctaatggatgtggacctggcgctccatctgatgccgaagtgctgcacctgtgcagatctctggaagtgggcaccgtgatgaccctgttctacagcaagaagtcccagcggcctgagagaaagaccttccaagtgaagctggaaacccggcagatcacctggtctagaggcgccgataagatcgagggcgccatcgacatcagagagatcaaagagatcagacccggcaagaccagccgggacttcgacagatatcaagaggaccccgccttcagacccgaccagagccactgttttgtgatcctgtacggcatggaatttcggctgaaaacactgagtctgcaggccaccagcgaggacgaagtgaacatgtggatcaagggcctgacctggctgatggaagataccctgcaagcccctacaccactgcagatcgagagatggctgcggaagcagttctactccgtggaccggaacagagaggacagaatcagcgccaaggacctgaagaacatgctgagccaagtgaactacagagtgcccaatatgcggttcctgagagagcggctgacagacctcgaacagagaagcggcgatatcacctacggccagttcgcccagctgtacagatccctgatgtacagcgcccagaaaacaatggacctgcctttcctggaagccagcacactgagagccggcgaaagacctgagctgtgtagagtgtccctgcctgagttccagcagttcctgctggattatcagggcgagctgtgggccgtcgatagactgcaggtccaagagtttatgctgagcttcctgcgggaccctctgagagagatcgaggaaccctacttcttcctggacgaatttgtgaccttcctgttcagcaaagagaacagcgtctggaacagccagctggacgccgtgtgtcccgacaccatgaacaatcctctgagccactactggatcagcagcagccacaatacctacctgaccggcgatcagttcagcagcgagagcagtctggaagcctacgccagatgcctgagaatgggctgcagatgcatcgagctggattgctgggatggccctgatggcatgcctgtgatctaccacggccacacactgaccaccaagatcaagttcagcgacgtgctgcacaccatcaaagaacacgccttcgtggccagcgagtaccccgtgattctgagcatcgaggaccactgctctatcgcccagcagaggaacatggcccagtacttcaagaaggtgctgggagacaccctgctgaccaagcctgtggaaatctctgccgatggcctgccttctccaaaccagctgaagcggaagatcctgatcaagcacaagaagctggccgagggcagcgcctatgaagaggtgccaaccagcatgatgtactccgagaacgacatcagcaacagcatcaagaacggcatcctgtacctggaagatcccgtgaaccacgagtggtatccccactacttcgtgctgaccagctccaagatctactacagcgaggaaaccagcagcgaccagggcaacgaggatgaagaggaacccaaagaggtgtccagcagcaccgagctgcacagcaatgagaagtggtttcacggcaagctcggcgctggcagagatggcagacatattgccgagagactgctgaccgagtactgcattgaaacaggcgcccctgacggcagctttctcgtgcgggaatctgagacattcgtgggcgactacaccctgagcttttggagaaacggcaaggtccagcactgcagaatccacagcagacaggacgccggcacacccaagttctttctgaccgacaacctggtgttcgacagcctgtacgacctgatcacccactaccagcaggtcccactgagatgcaacgagttcgagatgagactgagcgagcccgtgcctcagacaaacgcccacgagagcaaagaatggtatcacgccagcctgacaagagcccaggccgagcacatgctgatgagagttcctagagatggcgccttcctcgtgcggaagagaaacgagcctaacagctacgccatcagcttcagagccgagggaaagattaagcactgccgggtgcagcaagagggccagacagtgatgctgggcaacagcgagttcgattccctggtggatctgatcagctactacgagaagcaccctctctaccggaagatgaagctgagataccccatcaacgaggaagccctggaaaagatcggcaccgccgaacctgattacggcgccctgtatgagggcagaaaccccggcttctacgtggaagctaaccccatgcctaccttcaagtgtgccgtgaaggccctgttcgactacaaggcccaaagagaggacgagctgaccttcatcaagagcgccatcattcagaacgtcgagaagcaagaaggcggctggtggcggggagattatggcggaaagaaacagctgtggttccccagcaactatgtggaagagatggtcaaccccgtggcactggaacccgagagagaacaccttgacgagaacagccctctgggcgatctgctgagaggtgttctggatgtgcctgcctgccagatcgccattagacccgagggcaagaacaaccggctgttcgtgttcagcatctctatggcctctgtggcccattggtcactggatgtggccgccgattctcaagaggaactgcaggactgggtcaagaaaatcagagaggtggcccagaccgccgatgccagactgacagagggcaaaatcatggaacggcggaagaagatcgccctggaactgtctgagctggtggtgtactgcagacccgtgcctttcgacgaagagaagattggcaccgagcgggcctgctacagagacatgagcagctttccagagacaaaggccgagaaatacgtgaacaaggccaagggaaagaagttcctgcagtataaccggctgcagctgagcagaatctaccccaagggccagagactggacagctccaactacgaccctctgcctatgtggatctgtggctctcagctggtggctctgaactttcagacccctgacaagcccatgcagatgaaccaggctctgttcatgaccggcagacactgcggatatgtgctgcagccctccaccatgagagatgaggccttcgatcccttcgacaagagcagcctgagaggcctggaaccttgtgccatcagcattgaggtcctgggcgccagacatctgcctaagaatggcagaggcatcgtgtgccccttcgtggaaattgaagtggctggcgccgagtacgacagcaccaagcagaaaaccgagttcgtggtggacaacggactgaaccctgtgtggcctgccaagccattccacttccaaatcagcaaccccgagttcgccttcctgagattcgtggtgtacgaagaggacatgttctccgaccagaacttcctggcacaggccacctttccagtgaagggactgaaaaccggctaccgggccgtgcctctgaaaaacaactactccgaggatctggaactggccagcctgctgatcaagatcgacatcttccccgccaaagaaaacggcgatctgagcccttttagcggcaccagcctcagagagagaggatctgacgcttctggccagctgttccacggtagagccagagagggcagcttcgagagcagataccagcagcctttcgaggacttccggatctctcaagagcacctggccgaccacttcgactctagagaaagaagggcccctcggagaaccagagtgaacggcgacaacagactctga

SEQ ID NO: 161 - protein, 266 aa, Artificial sequence
  Synthetic polypeptide
MLLLVTSLLLCELPHPAFLLIPDILLTQTPLSLPVSLGDQASISCRSSQSLVHRNGNTYLHWYLQKPGQSPKLLIHKVSNRFSGVPDRFSGSGSGTDFTLKISRVEAEDLGVYFCSQSTHVPPLTFGAGTKLELKGSTSGSGKPGSGEGSTKGEVKLQQSGPSLVEPGASVMISCKASGSSFTGYNMNWVRQNIGKSLEWIGAIDPYYGGTSYNQKFKGRATLTVDKSSSTAYMHLKSLTSEDSAVYYCVSGMEYWGQGTSVTVSS

SEQ ID NO: 162 - protein, 690 aa, Artificial sequence
  Synthetic polypeptide
MLLLVTSLLLCELPHPAFLLIPDILLTQTPLSLPVSLGDQASISCRSSQSLVHRNGNTYLHWYLQKPGQSPKLLIHKVSNRFSGVPDRFSGSGSGTDFTLKISRVEAEDLGVYFCSQSTHVPPLTFGAGTKLELKGSTSGSGKPGSGEGSTKGEVKLQQSGPSLVEPGASVMISCKASGSSFTGYNMNWVRQNIGKSLEWIGAIDPYYGGTSYNQKFKGRATLTVDKSSSTAYMHLKSLTSEDSAVYYCVSGMEYWGQGTSVTVSSAAATTTPAPRPPTPAPTIASQPLSLRPEACRPAAGGAVHTRGLDFACDIYIWAPLAGTCGVLLLSLVITLYCKGSPNSSASNASGAAAPTLPAHPSTLTHPQRRIDTLNSDGYTPEPARITSPDKPRPMPMDTSVYESPYSDPEELKDKKLFLKRDNLLIADIELGCGNFGSVRQGVYRMRKKQIDVAIKVLKQGTEKADTEEMMREAQIMHQLDNPYIVRLIGVCQAEALMLVMEMAGGGPLHKFLVGKREEIPVSNVAELLHQVSMGMKYLEEKNFVHRDLAARNVLLVNRHYAKISDFGLSKALGADDSYYTARSAGKWPLKWYAPECINFRKFSSRSDVWSYGVTMWEALSYGQKPYKKMKGPEVMAFIEQGKRMECPPECPPELYALMSDCWIYKWEDRPDFLTVEQRMRACYYSLGNS

SEQ ID NO: 163 - protein, 351 aa, Artificial sequence
  Synthetic polypeptide
GSPNSSASNASGAAAPTLPAHPSTLTHPQRRIDTLNSDGYTPEPARITSPDKPRPMPMDTSAYESPYSDPEELKDKKLFLKRDNLLIADIELGCGNFGSVRQGVYRMRKKQIDVAIKVLKQGTEKADTEEMMREAQIMHQLDNPYIVRLIGVCQAEALMLVMEMAGGGPLHKFLVGKREEIPVSNVAELLHQVSMGMKYLEEKNFVHRDLAARNVLLVNRHYAKISDFGLSKALGADDSYYTARSAGKWPLKWYAPECINFRKFSSRSDVWSYGVTMWEALSYGQKPYKKMKGPEVMAFIEQGKRMECPPECPPELYALMSDCWIYKWEDRPDFLTVEQRMRACYYSLGNS

SEQ ID NO: 164 - protein, 690 aa, Artificial sequence
  Synthetic polypeptide
MVATLLVTSLLLCELPHPAFLLIPDTEVQLVESGGGLVQPGGSLRLSCAASGFTFSSFGMHWVRQAPGKGLEWVAYISSDSSAIYYADTVKGRFTISRDNAKNSLYLQMNSLRDEDTAVYYCGRGRENIYYGSRLDYWGQGTTVTVSSGGGGSGGGGSGGGGSDIQLTQSPSFLSASVGDRVTITCKASQNVDTNVAWYQQKPGKAPKALIYSASYRYSGVPSRFSGSGSGTDFTLTISSLQPEDFATYYCQQYNNYPFTFGQGTKLEIKAAAIEVMYPPPYLDNEKSNGTIIHVKGKHLCPSPLFPGPSKPFWVLVVVGGVLACYSLLVTVAFIIFWVGSPNSSASNASGAAAPTLPAHPSTLTHPQRRIDTLNSDGYTPEPARITSPDKPRPMPMDTSAYESPYSDPEELKDKKLFLKRDNLLIADIELGCGNFGSVRQGVYRMRKKQIDVAIKVLKQGTEKADTEEMMREAQIMHQLDNPYIVRLIGVCQAEALMLVMEMAGGGPLHKFLVGKREEIPVSNVAELLHQVSMGMKYLEEKNFVHRDLAARNVLLVNRHYAKISDFGLSKALGADDSYYTARSAGKWPLKWYAPECINFRKFSSRSDVWSYGVTMWEALSYGQKPYKKMKGPEVMAFIEQGKRMECPPECPPELYALMSDCWIYKWEDRPDFLTVEQRMRACYYSLGNS

SEQ ID NO: 165 - protein, 351 aa, Artificial sequence
  Synthetic polypeptide
GSPNSSASNASGAAAPTLPAHPSTLTHPQRRIDTLNSDGYTPEPARITSPDKPRPMPMDTSVYESPYSDPEELKPKKLFLKRDNLLIADIELGCGNFGSVRQGVYRMRKKQIDVAIKVLKQGTEKADTEEMMREAQIMHQLDNPYIVRLIGVCQAEALMLVMEMAGGGPLHKFLVGKREEIPVSNVAELLHQVSMGMKYLEEKNFVHRDLAARNVLLVNRHYAKISDFGLSKALGADDSYYTARSAGKWPLKWYAPECINFRKFSSRSDVWSYGVTMWEALSYGQKPYKKMKGPEVMAFIEQGKRMECPPECPPELYALMSDCWIYKWEDRPDFLTVEQRMRACYYSLGNS

SEQ ID NO: 166 - protein, 690 aa, Artificial sequence
  Synthetic polypeptide
MVATLLVTSLLLCELPHPAFLLIPDTEVQLVESGGGLVQPGGSLRLSCAASGFTFSSFGMHWVRQAPGKGLEWVAYISSDSSAIYYADTVKGRFTISRDNAKNSLYLQMNSLRDEDTAVYYCGRGRENIYYGSRLDYWGQGTTVTVSSGGGGSGGGGSGGGGSDIQLTQSPSFLSASVGDRVTITCKASQNVDTNVAWYQQKPGKAPKALIYSASYRYSGVPSRFSGSGSGTDFTLTISSLQPEDFATYYCQQYNNYPFTFGQGTKLEIKAAAIEVMYPPPYLDNEKSNGTIIHVKGKHLCPSPLFPGPSKPFWVLVVVGGVLACYSLLVTVAFIIFWVGSPNSSASNASGAAAPTLPAHPSTLTHPQRRIDTLNSDGYTPEPARITSPDKPRPMPMDTSVYESPYSDPEELKPKKLFLKRDNLLIADIELGCGNFGSVRQGVYRMRKKQIDVAIKVLKQGTEKADTEEMMREAQIMHQLDNPYIVRLIGVCQAEALMLVMEMAGGGPLHKFLVGKREEIPVSNVAELLHQVSMGMKYLEEKNFVHRDLAARNVLLVNRHYAKISDFGLSKALGADDSYYTARSAGKWPLKWYAPECINFRKFSSRSDVWSYGVTMWEALSYGQKPYKKMKGPEVMAFIEQGKRMECPPECPPELYALMSDCWIYKWEDRPDFLTVEQRMRACYYSLGNS

SEQ ID NO: 167 - protein, 351 aa, Artificial sequence
  Synthetic polypeptide
GSPNSSASNASGAAAPTLPAHPSTLTHPQRRIDTLNSDGYTPEPARITSPDKPRPMPMDTSVYESPYSDPEELKDKKLFLKRDNLLIADIELGCGNFGSVRQGVYRMPKKQIDVAIKVLKQGTEKADTEEMMREAQIMHQLDNPYIVRLIGVCQAEALMLVMEMAGGGPLHKFLVGKREEIPVSNVAELLHQVSMGMKYLEEKNFVHRDLAARNVLLVNRHYAKISDFGLSKALGADDSYYTARSAGKWPLKWYAPECINFRKFSSRSDVWSYGVTMWEALSYGQKPYKKMKGPEVMAFIEQGKRMECPPECPPELYALMSDCWIYKWEDRPDFLTVEQRMRACYYSLGNS

SEQ ID NO: 168 - protein, 690 aa, Artificial sequence
  Synthetic polypeptide
MVATLLVTSLLLCELPHPAFLLIPDTEVQLVESGGGLVQPGGSLRLSCAASGFTFSSFGMHWVRQAPGKGLEWVAYISSDSSAIYYADTVKGRFTISRDNAKNSLYLQMNSLRDEDTAVYYCGRGRENIYYGSRLDYWGQGTTVTVSSGGGGSGGGGSGGGGSDIQLTQSPSFLSASVGDRVTITCKASQNVDTNVAWYQQKPGKAPKALIYSASYRYSGVPSRFSGSGSGTDFTLTISSLQPEDFATYYCQQYNNYPFTFGQGTKLEIKAAAIEVMYPPPYLDNEKSNGTIIHVKGKHLCPSPLFPGPSKPFWVLVVVGGVLACYSLLVTVAFIIFWVGSPNSSASNASGAAAPTLPAHPSTLTHPQRRIDTLNSDGYTPEPARITSPDKPRPMPMDTSVYESPYSDPEELKDKKLFLKRDNLLIADIELGCGNFGSVRQGVYRMPKKQIDVAIKVLKQGTEKADTEEMMREAQIMHQLDNPYIVRLIGVCQAEALMLVMEMAGGGPLHKFLVGKREEIPVSNVAELLHQVSMGMKYLEEKNFVHRDLAARNVLLVNRHYAKISDFGLSKALGADDSYYTARSAGKWPLKWYAPECINFRKFSSRSDVWSYGVTMWEALSYGQKPYKKMKGPEVMAFIEQGKRMECPPECPPELYALMSDCWIYKWEDRPDFLTVEQRMRACYYSLGNS

SEQ ID NO: 169 - protein, 351 aa, Artificial sequence
  Synthetic polypeptide
GSPNSSASNASGAAAPTLPAHPSTLTHPQRRIDTLNSDGYTPEPARITSPDKPRPMPMDTSVYESPYSDPEELKDKKLFLKRDNLLIADIELGCGNFGSVRQGVYRMRKEQIDVAIKVLKQGTEKADTEEMMREAQIMHQLDNPYIVRLIGVCQAEALMLVMEMAGGGPLHKFLVGKREEIPVSNVAELLHQVSMGMKYLEEKNFVHRDLAARNVLLVNRHYAKISDFGLSKALGADDSYYTARSAGKWPLKWYAPECINFRKFSSRSDVWSYGVTMWEALSYGQKPYKKMKGPEVMAFIEQGKRMECPPECPPELYALMSDCWIYKWEDRPDFLTVEQRMRACYYSLGNS

SEQ ID NO: 170 - protein, 690 aa, Artificial sequence
  Synthetic polypeptide
MVATLLVTSLLLCELPHPAFLLIPDTEVQLVESGGGLVQPGGSLRLSCAASGFTFSSFGMHWVRQAPGKGLEWVAYISSDSSAIYYADTVKGRFTISRDNAKNSLYLQMNSLRDEDTAVYYCGRGRENIYYGSRLDYWGQGTTVTVSSGGGGSGGGGSGGGGSDIQLTQSPSFLSASVGDRVTITCKASQNVDTNVAWYQQKPGKAPKALIYSASYRYSGVPSRFSGSGSGTDFTLTISSLQPEDFATYYCQQYNNYPFTFGQGTKLEIKAAAIEVMYPPPYLDNEKSNGTIIHVKGKHLCPSPLFPGPSKPFWVLVVVGGVLACYSLLVTVAFIIFWVGSPNSSASNASGAAAPTLPAHPSTLTHPQRRIDTLNSDGYTPEPARITSPDKPRPMPMDTSVYESPYSDPEELKDKKLFLKRDNLLIADIELGCGNFGSVRQGVYRMRKEQIDVAIKVLKQGTEKADTEEMMREAQIMHQLDNPYIVRLIGVCQAEALMLVMEMAGGGPLHKFLVGKREEIPVSNVAELLHQVSMGMKYLEEKNFVHRDLAARNVLLVNRHYAKISDFGLSKALGADDSYYTARSAGKWPLKWYAPECINFRKFSSRSDVWSYGVTMWEALSYGQKPYKKMKGPEVMAFIEQGKRMECPPECPPELYALMSDCWIYKWEDRPDFLTVEQRMRACYYSLGNS

SEQ ID NO: 171 - protein, 732 aa, Artificial sequence
  Synthetic polypeptide
MVATLLVTSLLLCELPHPAFLLIPDTEVQLVESGGGLVQPGGSLRLSCAASGFTFSSFGMHWVRQAPGKGLEWVAYISSDSSAIYYADTVKGRFTISRDNAKNSLYLQMNSLRDEDTAVYYCGRGRENIYYGSRLDYWGQGTTVTVSSGGGGSGGGGSGGGGSDIQLTQSPSFLSASVGDRVTITCKASQNVDTNVAWYQQKPGKAPKALIYSASYRYSGVPSRFSGSGSGTDFTLTISSLQPEDFATYYCQQYNNYPFTFGQGTKLEIKAAAIEVMYPPPYLDNEKSNGTIIHVKGKHLCPSPLFPGPSKPFWVLVVVGGVLACYSLLVTVAFIIFWVKRGRKKLLYIFKQPFMRPVQTTQEEDGCSCRFPEEEEGGCELGSPNSSASNASGAAAPTLPAHPSTLTHPQRRIDTLNSDGFTPEPARITSPDKPRPMPMDTSVYESPYSDPEELKDKKLFLKRDNLLIADIELGCGNFGSVRQGVYRMRKKQIDVAIKVLKQGTEKADTEEMMREAQIMHQLDNPYIVRLIGVCQAEALMLVMEMAGGGPLHKFLVGKREEIPVSNVAELLHQVSMGMKYLEEKNFVHRDLAARNVLLVNRHYAKISDFGLSKALGADDSYYTARSAGKWPLKWYAPECINFRKFSSRSDVWSYGVTMWEALSYGQKPYKKMKGPEVMAFIEQGKRMECPPECPPELYALMSDCWIYKWEDRPDFLTVEQRMRACYYSLGNS

SEQ ID NO: 172 - protein, 687 aa, Artificial sequence
  Synthetic polypeptide
MLLLVTSLLLCELPHPAFLLIPDIQMTQTTSSLSASLGDRVTISCRASQDISKYLNWYQQKPDGTVKLLIYHTSRLHSGVPSRFSGSGSGTDYSLTISNLEQEDIATYFCQQGNTLPYTFGGGTKLEITGSTSGSGKPGSGEGSTKGEVKLQESGPGLVAPSQSLSVTCTVSGVSLPDYGVSWIRQPPRKGLEWLGVIWGSETTYYNSALKSRLTIIKDNSKSQVFLKMNSLQTDDTAIYYCAKHYYYGGSYAMDYWGQGTSVTVSSAAAIEVMYPPPYLDNEKSNGTIIHVKGKHLCPSPLFPGPSKPFWVLVVVGGVLACYSLLVTVAFIIFWVGSPNSSASNASGAAAPTLPAHPSTLTHPQRRIDTLNSDGFTPEPARITSPDKPRPMPMDTSVYESPYSDPEELKDKKLFLKRDNLLIADIELGCGNFGSVRQGVYRMRKKQIDVAIKVLKQGTEKADTEEMMREAQIMHQLDNPYIVRLIGVCQAEALMLVMEMAGGGPLHKFLVGKREEIPVSNVAELLHQVSMGMKYLEEKNFVHRDLAARNVLLVNRHYAKISDFGLSKALGADDSYYTARSAGKWPLKWYAPECINFRKFSSRSDVWSYGVTMWEALSYGQKPYKKMKGPEVMAFIEQGKRMECPPECPPELYALMSDCWIYKWEDRPDFLTVEQRMRACYYSLGNS

SEQ ID NO: 173 - protein, 728 aa, Artificial sequence
  Synthetic polypeptide
MLLLVTSLLLCELPHPAFLLIPDIQMTQTTSSLSASLGDRVTISCRASQDISKYLNWYQQKPDGTVKLLIYHTSRLHSGVPSRFSGSGSGTDYSLTISNLEQEDIATYFCQQGNTLPYTFGGGTKLEITGSTSGSGKPGSGEGSTKGEVKLQESGPGLVAPSQSLSVTCTVSGVSLPDYGVSWIRQPPRKGLEWLGVIWGSETTYYNSALKSRLTIIKDNSKSQVFLKMNSLQTDDTAIYYCAKHYYYGGSYAMDYWGQGTSVTVSSAAAIEVMYPPPYLDNEKSNGTIIHVKGKHLCPSPLFPGPSKPFWVLVVVGGVLACYSLLVTVAFIIFWVRSKRSRLLHSDYMNMTPRRPGPTRKHYQPYAPPRDFAAYRSGSPNSSASNASGAAAPTLPAHPSTLTHPQRRIDTLNSDGYTPEPARITSPDKPRPMPMDTSVYESPYSDPEELKDKKLFLKRDNLLIADIELGCGNFGSVRQGVYRMRKKQIDVAIKVLKQGTEKADTEEMMREAQIMHQLDNPYIVRLIGVCQAEALMLVMEMAGGGPLHKFLVGKREEIPVSNVAELLHQVSMGMKYLEEKNFVHRDLAARNVLLVNRHYAKISDFGLSKALGADDSYYTARSAGKWPLKWYAPECINFRKFSSRSDVWSYGVTMWEALSYGQKPYKKMKGPEVMAFIEQGKRMECPPECPPELYALMSDCWIYKWEDRPDFLTVEQRMRACYYSLGNS

SEQ ID NO: 174 - protein, 729 aa, Artificial sequence
  Synthetic polypeptide
MLLLVTSLLLCELPHPAFLLIPDIQMTQTTSSLSASLGDRVTISCRASQDISKYLNWYQQKPDGTVKLLIYHTSRLHSGVPSRFSGSGSGTDYSLTISNLEQEDIATYFCQQGNTLPYTFGGGTKLEITGSTSGSGKPGSGEGSTKGEVKLQESGPGLVAPSQSLSVTCTVSGVSLPDYGVSWIRQPPRKGLEWLGVIWGSETTYYNSALKSRLTIIKDNSKSQVFLKMNSLQTDDTAIYYCAKHYYYGGSYAMDYWGQGTSVTVSSAAAIEVMYPPPYLDNEKSNGTIIHVKGKHLCPSPLFPGPSKPFWVLVVVGGVLACYSLLVTVAFIIFWVKRGRKKLLYIFKQPFMRPVQTTQEEDGCSCRFPEEEEGGCELGSPNSSASNASGAAAPTLPAHPSTLTHPQRRIDTLNSDGYTPEPARITSPDKPRPMPMDTSVYESPYSDPEELKDKKLFLKRDNLLIADIELGCGNFGSVRQGVYRMRKKQIDVAIKVLKQGTEKADTEEMMREAQIMHQLDNPYIVRLIGVCQAEALMLVMEMAGGGPLHKFLVGKREEIPVSNVAELLHQVSMGMKYLEEKNFVHRDLAARNVLLVNRHYAKISDFGLSKALGADDSYYTARSAGKWPLKWYAPECINFRKFSSRSDVWSYGVTMWEALSYGQKPYKKMKGPEVMAFIEQGKRMECPPECPPELYALMSDCWIYKWEDRPDFLTVEQRMRACYYSLGNS

SEQ ID NO: 175 - protein, 728 aa, Artificial sequence
  Synthetic polypeptide
MLLLVTSLLLCELPHPAFLLIPDIQMTQTTSSLSASLGDRVTISCRASQDISKYLNWYQQKPDGTVKLLIYHTSRLHSGVPSRFSGSGSGTDYSLTISNLEQEDIATYFCQQGNTLPYTFGGGTKLEITGSTSGSGKPGSGEGSTKGEVKLQESGPGLVAPSQSLSVTCTVSGVSLPDYGVSWIRQPPRKGLEWLGVIWGSETTYYNSALKSRLTIIKDNSKSQVFLKMNSLQTDDTAIYYCAKHYYYGGSYAMDYWGQGTSVTVSSAAAIEVMYPPPYLDNEKSNGTIIHVKGKHLCPSPLFPGPSKPFWVLVVVGGVLACYSLLVTVAFIIFWVRSKRSRLLHSDYMNMTPRRPGPTRKHYQPYAPPRDFAAYRSGSPNSSASNASGAAAPTLPAHPSTLTHPQRRIDTLNSDGFTPEPARITSPDKPRPMPMDTSVYESPYSDPEELKDKKLFLKRDNLLIADIELGCGNFGSVRQGVYRMRKKQIDVAIKVLKQGTEKADTEEMMREAQIMHQLDNPYIVRLIGVCQAEALMLVMEMAGGGPLHKFLVGKREEIPVSNVAELLHQVSMGMKYLEEKNFVHRDLAARNVLLVNRHYAKISDFGLSKALGADDSYYTARSAGKWPLKWYAPECINFRKFSSRSDVWSYGVTMWEALSYGQKPYKKMKGPEVMAFIEQGKRMECPPECPPELYALMSDCWIYKWEDRPDFLTVEQRMRACYYSLGNS

SEQ ID NO: 176 - protein, 729 aa, Artificial sequence
  Synthetic polypeptide
MLLLVTSLLLCELPHPAFLLIPDIQMTQTTSSLSASLGDRVTISCRASQDISKYLNWYQQKPDGTVKLLIYHTSRLHSGVPSRFSGSGSGTDYSLTISNLEQEDIATYFCQQGNTLPYTFGGGTKLEITGSTSGSGKPGSGEGSTKGEVKLQESGPGLVAPSQSLSVTCTVSGVSLPDYGVSWIRQPPRKGLEWLGVIWGSETTYYNSALKSRLTIIKDNSKSQVFLKMNSLQTDDTAIYYCAKHYYYGGSYAMDYWGQGTSVTVSSAAAIEVMYPPPYLDNEKSNGTIIHVKGKHLCPSPLFPGPSKPFWVLVVVGGVLACYSLLVTVAFIIFWVKRGRKKLLYIFKQPFMRPVQTTQEEDGCSCRFPEEEEGGCELGSPNSSASNASGAAAPTLPAHPSTLTHPQRRIDTLNSDGFTPEPARITSPDKPRPMPMDTSVYESPYSDPEELKDKKLFLKRDNLLIADIELGCGNFGSVRQGVYRMRKKQIDVAIKVLKQGTEKADTEEMMREAQIMHQLDNPYIVRLIGVCQAEALMLVMEMAGGGPLHKFLVGKREEIPVSNVAELLHQVSMGMKYLEEKNFVHRDLAARNVLLVNRHYAKISDFGLSKALGADDSYYTARSAGKWPLKWYAPECINFRKFSSRSDVWSYGVTMWEALSYGQKPYKKMKGPEVMAFIEQGKRMECPPECPPELYALMSDCWIYKWEDRPDFLTVEQRMRACYYSLGNS

SEQ ID NO: 177 - protein, 326 aa, Artificial sequence
  Synthetic polypeptide
GSPQRRIDTLNSDGYTPEPARITSPDKPRPMPMDTSVYESPYSDPEELKDKKLFLKRDNLLIADIELGCGNFGSVRQGVYRMRKKQIDVAIKVLKQGTEKADTEEMMREAQIMHQLDNPYIVRLIGVCQAEALMLVMEMAGGGPLHKFLVGKREEIPVSNVAELLHQVSMGMKYLEEKNFVHRDLAARNVLLVNRHYAKISDFGLSKALGADDSYYTARSAGKWPLKWYAPECINFRKFSSRSDVWSYGVTMWEALSYGQKPYKKMKGPEVMAFIEQGKRMECPPECPPELYALMSDCWIYKWEDRPDFLTVEQRMRACYYSLGNS

SEQ ID NO: 178 - protein, 665 aa, Artificial sequence
  Synthetic polypeptide
MVATLLVTSLLLCELPHPAFLLIPDTEVQLVESGGGLVQPGGSLRLSCAASGFTFSSFGMHWVRQAPGKGLEWVAYISSDSSAIYYADTVKGRFTISRDNAKNSLYLQMNSLRDEDTAVYYCGRGRENIYYGSRLDYWGQGTTVTVSSGGGGSGGGGSGGGGSDIQLTQSPSFLSASVGDRVTITCKASQNVDTNVAWYQQKPGKAPKALIYSASYRYSGVPSRFSGSGSGTDFTLTISSLQPEDFATYYCQQYNNYPFTFGQGTKLEIKAAAIEVMYPPPYLDNEKSNGTIIHVKGKHLCPSPLFPGPSKPFWVLVVVGGVLACYSLLVTVAFIIFWVGSPQRRIDTLNSDGYTPEPARITSPDKPRPMPMDTSVYESPYSDPEELKDKKLFLKRDNLLIADIELGCGNFGSVRQGVYRMRKKQIDVAIKVLKQGTEKADTEEMMREAQIMHQLDNPYIVRLIGVCQAEALMLVMEMAGGGPLHKFLVGKREEIPVSNVAELLHQVSMGMKYLEEKNFVHRDLAARNVLLVNRHYAKISDFGLSKALGADDSYYTARSAGKWPLKWYAPECINFRKFSSRSDVWSYGVTMWEALSYGQKPYKKMKGPEVMAFIEQGKRMECPPECPPELYALMSDCWIYKWEDRPDFLTVEQRMRACYYSLGNS

SEQ ID NO: 179 - protein, 298 aa, Artificial sequence
  Synthetic polypeptide
GSMPMDTSVYESPYSDPEELKDKKLFLKRDNLLIADIELGCGNFGSVRQGVYRMRKKQIDVAIKVLKQGTEKADTEEMMREAQIMHQLDNPYIVRLIGVCQAEALMLVMEMAGGGPLHKFLVGKREEIPVSNVAELLHQVSMGMKYLEEKNFVHRDLAARNVLLVNRHYAKISDFGLSKALGADDSYYTARSAGKWPLKWYAPECINFRKFSSRSDVWSYGVTMWEALSYGQKPYKKMKGPEVMAFIEQGKRMECPPECPPELYALMSDCWIYKWEDRPDFLTVEQRMRACYYSLGNS

SEQ ID NO: 180 - protein, 637 aa, Artificial sequence
  Synthetic polypeptide
MVATLLVTSLLLCELPHPAFLLIPDTEVQLVESGGGLVQPGGSLRLSCAASGFTFSSFGMHWVRQAPGKGLEWVAYISSDSSAIYYADTVKGRFTISRDNAKNSLYLQMNSLRDEDTAVYYCGRGRENIYYGSRLDYWGQGTTVTVSSGGGGSGGGGSGGGGSDIQLTQSPSFLSASVGDRVTITCKASQNVDTNVAWYQQKPGKAPKALIYSASYRYSGVPSRFSGSGSGTDFTLTISSLQPEDFATYYCQQYNNYPFTFGQGTKLEIKAAAIEVMYPPPYLDNEKSNGTIIHVKGKHLCPSPLFPGPSKPFWVLVVVGGVLACYSLLVTVAFIIFWVGSMPMDTSVYESPYSDPEELKDKKLFLKRDNLLIADIELGCGNFGSVRQGVYRMRKKQIDVAIKVLKQGTEKADTEEMMREAQIMHQLDNPYIVRLIGVCQAEALMLVMEMAGGGPLHKFLVGKREEIPVSNVAELLHQVSMGMKYLEEKNFVHRDLAARNVLLVNRHYAKISDFGLSKALGADDSYYTARSAGKWPLKWYAPECINFRKFSSRSDVWSYGVTMWEALSYGQKPYKKMKGPEVMAFIEQGKRMECPPECPPELYALMSDCWIYKWEDRPDFLTVEQRMRACYYSLGNS

SEQ ID NO: 181 - protein, 579 aa, Artificial sequence
  Synthetic polypeptide
MVATLLVTSLLLCELPHPAFLLIPDTEVQLVESGGGLVQPGGSLRLSCAASGFTFSSFGMHWVRQAPGKGLEWVAYISSDSSAIYYADTVKGRFTISRDNAKNSLYLQMNSLRDEDTAVYYCGRGRENIYYGSRLDYWGQGTTVTVSSGGGGSGGGGSGGGGSDIQLTQSPSFLSASVGDRVTITCKASQNVDTNVAWYQQKPGKAPKALIYSASYRYSGVPSRFSGSGSGTDFTLTISSLQPEDFATYYCQQYNNYPFTFGQGTKLEIKAAAIEVMYPPPYLDNEKSNGTIIHVKGKHLCPSPLFPGPSKPFWVLVVVGGVLACYSLLVTVAFIIFWVGSHCHRLPGSYDSTSSDSLYPRGIQFKRPHTVAPWPPAYPPVTSYPPLSQPDLLPIPRSPQPLGGSHRTPSSRRDSDGANSVASYENEGASGIRGAQAGWGVWGPSWTRLTPVSLPPEPACEDADEDEDDYHNPGYLVVLPDSTPATSTAAPSAPALSTPGIRDSAFSMESIDDYVNVPESGESAEASLDGSREYVNVSQELHPGAAKTEPAALSSQEAEEVEEEGAPDYENLQELNGNS

SEQ ID NO: 182 - protein, 885 aa, Artificial sequence
  Synthetic polypeptide
MVATLLVTSLLLCELPHPAFLLIPDTEVQLVESGGGLVQPGGSLRLSCAASGFTFSSFGMHWVRQAPGKGLEWVAYISSDSSAIYYADTVKGRFTISRDNAKNSLYLQMNSLRDEDTAVYYCGRGRENIYYGSRLDYWGQGTTVTVSSGGGGSGGGGSGGGGSDIQLTQSPSFLSASVGDRVTITCKASQNVDTNVAWYQQKPGKAPKALIYSASYRYSGVPSRFSGSGSGTDFTLTISSLQPEDFATYYCQQYNNYPFTFGQGTKLEIKAAATTTPAPRPPTPAPTIASQPLSLRPEACRPAAGGAVHTRGLDFACDIYIWAPLAGTCGVLLLSLVITLYCKGSGGGGSALRNVPFRSEVLGWDPDSLADYFKKLNYKDCEKAVKKYHIDGARFLNLTENDIQKFPKLRVPILSKLSQEINKNEERRSIFTRKPQVPRFPEETESHEEDNGGWSSFEEDDYESPNDDQDGEDDGDYESPNEEEEAPVEDDADYEPPPSNDEEALQNSILPAKPFPNSNSMYIDRPPSGKTPQQPPVPPQRPMAALPPPPAGRNHSPLPPPQTNHEEPSRSRNHKTAKLPAPSIDRSTKPPLDRSLAPFDREPFTLGKKPPFSDKPSIPAGRSLGEHLPKIQKPPLPPTTERHERSSPLPGKKPPVPKHGWGPDRRENDEDDVHQRPLPQPALLPMSSNTFPSRSTKPSPMNPLPSSHMPGAFSESNSSFPQSASLPPYFSQGPSNRPPIRAEGRNFPLPLPNKPRPPSPAEEENSLNEEWYVSYITRPEAEAALRKINQDGTFLVRDSSKKTTTNPYVLMVLYKDKVYNIQIRYQKESQVYLLGTGLRGKEDFLSVSDIIDYFRKMPLLLIDGKNRGSRYQCTLTHAAGYPGNS

SEQ ID NO: 183 - protein, 575 aa, Artificial sequence
  Synthetic polypeptide
MLLLVTSLLLCELPHPAFLLIPDILLTQTPLSLPVSLGDQASISCRSSQSLVHRNGNTYLHWYLQKPGQSPKLLIHKVSNRFSGVPDRFSGSGSGTDFTLKISRVEAEDLGVYFCSQSTHVPPLTFGAGTKLELKGSTSGSGKPGSGEGSTKGEVKLQQSGPSLVEPGASVMISCKASGSSFTGYNMNWVRQNIGKSLEWIGAIDPYYGGTSYNQKFKGRATLTVDKSSSTAYMHLKSLTSEDSAVYYCVSGMEYWGQGTSVTVSSAAAIEVMYPPPYLDNEKSNGTIIHVKGKHLCPSPLFPGPSKPFWVLVVVGGVLACYSLLVTVAFIIFWVGSHCHRLPGSYDSTSSDSLYPRGIQFKRPHTVAPWPPAYPPVTSYPPLSQPDLLPIPRSPQPLGGSHRTPSSRRDSDGANSVASYENEGASGIRGAQAGWGVWGPSWTRLTPVSLPPEPACEDADEDEDDYHNPGYLVVLPDSTPATSTAAPSAPALSTPGIRDSAFSMESIDDYVNVPESGESAEASLDGSREYVNVSQELHPGAAKTEPAALSSQEAEEVEEEGAPDYENLQELNGNS

SEQ ID NO: 184 - protein, 881 aa, Artificial sequence
  Synthetic polypeptide
MLLLVTSLLLCELPHPAFLLIPDILLTQTPLSLPVSLGDQASISCRSSQSLVHRNGNTYLHWYLQKPGQSPKLLIHKVSNRFSGVPDRFSGSGSGTDFTLKISRVEAEDLGVYFCSQSTHVPPLTFGAGTKLELKGSTSGSGKPGSGEGSTKGEVKLQQSGPSLVEPGASVMISCKASGSSFTGYNMNWVRQNIGKSLEWIGAIDPYYGGTSYNQKFKGRATLTVDKSSSTAYMHLKSLTSEDSAVYYCVSGMEYWGQGTSVTVSSAAATTTPAPRPPTPAPTIASQPLSLRPEACRPAAGGAVHTRGLDFACDIYIWAPLAGTCGVLLLSLVITLYCKGSGGGGSALRNVPFRSEVLGWDPDSLADYFKKLNYKDCEKAVKKYHIDGARFLNLTENDIQKFPKLRVPILSKLSQEINKNEERRSIFTRKPQVPRFPEETESHEEDNGGWSSFEEDDYESPNDDQDGEDDGDYESPNEEEEAPVEDDADYEPPPSNDEEALQNSILPAKPFPNSNSMYIDRPPSGKTPQQPPVPPQRPMAALPPPPAGRNHSPLPPPQTNHEEPSRSRNHKTAKLPAPSIDRSTKPPLDRSLAPFDREPFTLGKKPPFSDKPSIPAGRSLGEHLPKIQKPPLPPTTERHERSSPLPGKKPPVPKHGWGPDRRENDEDDVHQRPLPQPALLPMSSNTFPSRSTKPSPMNPLPSSHMPGAFSESNSSFPQSASLPPYFSQGPSNRPPIRAEGRNFPLPLPNKPRPPSPAEEENSLNEEWYVSYITRPEAEAALRKINQDGTFLVRDSSKKTTTNPYVLMVLYKDKVYNIQIRYQKESQVYLLGTGLRGKEDFLSVSDIIDYFRKMPLLLIDGKNRGSRYQCTLTHAAGYPGNS

SEQ ID NO: 185 - protein, 109 aa, Artificial sequence
  Synthetic polypeptide
SHRTPSSRRDSDGANSVASYENEGASGIRGAQAGWGVWGPSWTRLTPVSLPPEPACEDADEDEDDYHNPGYLVVLPDSTPATSTAAPSAPALSTPGIRDSAFSMESIDD

SEQ ID NO: 186 - protein, 445 aa, Artificial sequence
  Synthetic polypeptide
MLLLVTSLLLCELPHPAFLLIPDIQMTQTTSSLSASLGDRVTISCRASQDISKYLNWYQQKPDGTVKLLIYHTSRLHSGVPSRFSGSGSGTDYSLTISNLEQEDIATYFCQQGNTLPYTFGGGTKLEITGSTSGSGKPGSGEGSTKGEVKLQESGPGLVAPSQSLSVTCTVSGVSLPDYGVSWIRQPPRKGLEWLGVIWGSETTYYNSALKSRLTIIKDNSKSQVFLKMNSLQTDDTAIYYCAKHYYYGGSYAMDYWGQGTSVTVSSAAAIEVMYPPPYLDNEKSNGTIIHVKGKHLCPSPLFPGPSKPFWVLVVVGGVLACYSLLVTVAFIIFWVSHRTPSSRRDSDGANSVASYENEGASGIRGAQAGWGVWGPSWTRLTPVSLPPEPACEDADEDEDDYHNPGYLVVLPDSTPATSTAAPSAPALSTPGIRDSAFSMESIDD

SEQ ID NO: 187 - protein, 445 aa, Artificial sequence
  Synthetic polypeptide
MLLLVTSLLLCELPHPAFLLIPDIQMTQTTSSLSASLGDRVTISCRASQDISKYLNWYQQKPDGTVKLLIYHTSRLHSGVPSRFSGSGSGTDYSLTISNLEQEDIATYFCQQGNTLPYTFGGGTKLEITGSTSGSGKPGSGEGSTKGEVKLQESGPGLVAPSQSLSVTCTVSGVSLPDYGVSWIRQPPRKGLEWLGVIWGSETTYYNSALKSRLTIIKDNSKSQVFLKMNSLQTDDTAIYYCAKHYYYGGSYAMDYWGQGTSVTVSSAAAIEVMYPPPYLDNEKSNGTIIHVKGKHLAPSPLFPGPSKPFWVLVVVGGVLAAYSLLVTVAFIIFWVSHRTPSSRRDSDGANSVASYENEGASGIRGAQAGWGVWGPSWTRLTPVSLPPEPACEDADEDEDDYHNPGYLVVLPDSTPATSTAAPSAPALSTPGIRDSAFSMESIDD

SEQ ID NO: 188 - protein, 69 aa, Artificial sequence
  Synthetic polypeptide
SWTRLTPVSLPPEPACEDADEDEDDYHNPGYLVVLPDSTPATSTAAPSAPALSTPGIRDSAFSMESIDD

SEQ ID NO: 189 - protein, 405 aa, Artificial sequence
  Synthetic polypeptide
MLLLVTSLLLCELPHPAFLLIPDIQMTQTTSSLSASLGDRVTISCRASQDISKYLNWYQQKPDGTVKLLIYHTSRLHSGVPSRFSGSGSGTDYSLTISNLEQEDIATYFCQQGNTLPYTFGGGTKLEITGSTSGSGKPGSGEGSTKGEVKLQESGPGLVAPSQSLSVTCTVSGVSLPDYGVSWIRQPPRKGLEWLGVIWGSETTYYNSALKSRLTIIKDNSKSQVFLKMNSLQTDDTAIYYCAKHYYYGGSYAMDYWGQGTSVTVSSAAAIEVMYPPPYLDNEKSNGTIIHVKGKHLCPSPLFPGPSKPFWVLVVVGGVLACYSLLVTVAFIIFWVSWTRLTPVSLPPEPACEDADEDEDDYHNPGYLVVLPDSTPATSTAAPSAPALSTPGIRDSAFSMESIDD

SEQ ID NO: 190 - protein, 405 aa, Artificial sequence
  Synthetic polypeptide
MLLLVTSLLLCELPHPAFLLIPDIQMTQTTSSLSASLGDRVTISCRASQDISKYLNWYQQKPDGTVKLLIYHTSRLHSGVPSRFSGSGSGTDYSLTISNLEQEDIATYFCQQGNTLPYTFGGGTKLEITGSTSGSGKPGSGEGSTKGEVKLQESGPGLVAPSQSLSVTCTVSGVSLPDYGVSWIRQPPRKGLEWLGVIWGSETTYYNSALKSRLTIIKDNSKSQVFLKMNSLQTDDTAIYYCAKHYYYGGSYAMDYWGQGTSVTVSSAAAIEVMYPPPYLDNEKSNGTIIHVKGKHLAPSPLFPGPSKPFWVLVVVGGVLAAYSLLVTVAFIIFWVSWTRLTPVSLPPEPACEDADEDEDDYHNPGYLVVLPDSTPATSTAAPSAPALSTPGIRDSAFSMESIDD

SEQ ID NO: 191 - protein, 436 aa, Artificial sequence
  Synthetic polypeptide
GSFTRKPQVPRFPEETESHEEDNGGWSSFEEDDYESPNDDQDGEDDGDYESPNEEEEAPVEDDADYEPPPSNDEEALQNSILPAKPFPNSNSMYIDRPPSGKTPQQPPVPPQRPMAALPPPPAGRNHSPLPPPQTNHEEPSRSRRSLAPFDREPFTLGKKPPFSDKPSIPAGRSLGEHLPKIQKPPLPPTTERHERSSPLPGKKPPVPKHGWGPDRRENDEDDVHQRPLPQPALLPMSSNTFPSRSTKPSPMNPLPSSHMPGAFSESNSSFPQSASLPPYFSQGPSNRPPIRAEGRNFPLPLPNKPRPPSPAEEENSLNEEWYVSYITRPEAEAALRKINQDGTFLVRDSSKKTTTNPYVLMVLYKDKVYNIQIRYQKESQVYLLGTGLRGKEDFLSVSDIIDYFRKMPLLLIDGKNRGSRYQCTLTHAAGYPGNS

SEQ ID NO: 192 - protein, 773 aa, Artificial sequence
  Synthetic polypeptide
MARSVTLVFLVLVSLTGLYAADIQMTQSPSSLSASVGDRVTITCRASQDVNTAVAWYQQKPGKAPKLLIYSASFLESGVPSRFSGSRSGTDFTLTISSLQPEDFATYYCQQHYTTPPTFGQGTKVEIKGSTSGSGKPGSGEGSGEVQLVESGGGLVQPGGSLRLSCAASGFNIKDTYIHWVRQAPGKGLEWVARIYPTNGYTRYADSVKGRFTISADTSKNTAYLQMNSLRAEDTAVYYCSRWGGDGFYAMDVWGQGTLVTVSSAAATTTPAPRPPTPAPTIASQPLSLRPEACRPAAGGAVHTRGLDFACDIYIWAPLAGTCGVLLLSLVITLYCKGSFTRKPQVPRFPEETESHEEDNGGWSSFEEDDYESPNDDQDGEDDGDYESPNEEEEAPVEDDADYEPPPSNDEEALQNSILPAKPFPNSNSMYIDRPPSGKTPQQPPVPPQRPMAALPPPPAGRNHSPLPPPQTNHEEPSRSRRSLAPFDREPFTLGKKPPFSDKPSIPAGRSLGEHLPKIQKPPLPPTTERHERSSPLPGKKPPVPKHGWGPDRRENDEDDVHQRPLPQPALLPMSSNTFPSRSTKPSPMNPLPSSHMPGAFSESNSSFPQSASLPPYFSQGPSNRPPIRAEGRNFPLPLPNKPRPPSPAEEENSLNEEWYVSYITRPEAEAALRKINQDGTFLVRDSSKKTTTNPYVLMVLYKDKVYNIQIRYQKESQVYLLGTGLRGKEDFLSVSDIIDYFRKMPLLLIDGKNRGSRYQCTLTHAAGYPGNS

SEQ ID NO: 193 - protein, 500 aa, Artificial sequence
  Synthetic polypeptide
GSGGGGSALRNVPFRSEVLGWDPDSLADYFKKLNYKDCEKAVKKYHIDGARFLNLTENDIQKFPKLRVPILSKLSQEINKNEERRSIFTRKPQVPRFPEETESHEEDNGGWSSFEEDDYESPNDDQDGEDDGDYESPNEEEEAPVEDDADYEPPPSNDEEALQNSILPAKPFPNSNSMYIDRPPSGKTPQQPPVPPQRPMAALPPPPAGRNHSPLPPPQTNHEEPSRSRKPSIPAGRSLGEHLPKIQKPPLPPTTERHERSSPLPGKKPPVPKHGWGPDRRENDEDDVHQRPLPQPALLPMSSNTFPSRSTKPSPMNPLPSSHMPGAFSESNSSFPQSASLPPYFSQGPSNRPPIRAEGRNFPLPLPNKPRPPSPAEEENSLNEEWYVSYITRPEAEAALRKINQDGTFLVRDSSKKTTTNPYVLMVLYKDKVYNIQIRYQKESQVYLLGTGLRGKEDFLSVSDIIDYFRKMPLLLIDGKNRGSRYQCTLTHAAGYPGNS

SEQ ID NO: 194 - protein, 837 aa, Artificial sequence
  Synthetic polypeptide
MARSVTLVFLVLVSLTGLYAADIQMTQSPSSLSASVGDRVTITCRASQDVNTAVAWYQQKPGKAPKLLIYSASFLESGVPSRFSGSRSGTDFTLTISSLQPEDFATYYCQQHYTTPPTFGQGTKVEIKGSTSGSGKPGSGEGSGEVQLVESGGGLVQPGGSLRLSCAASGFNIKDTYIHWVRQAPGKGLEWVARIYPTNGYTRYADSVKGRFTISADTSKNTAYLQMNSLRAEDTAVYYCSRWGGDGFYAMDVWGQGTLVTVSSAAATTTPAPRPPTPAPTIASQPLSLRPEACRPAAGGAVHTRGLDFACDIYIWAPLAGTCGVLLLSLVITLYCKGSGGGGSALRNVPFRSEVLGWDPDSLADYFKKLNYKDCEKAVKKYHIDGARFLNLTENDIQKFPKLRVPILSKLSQEINKNEERRSIFTRKPQVPRFPEETESHEEDNGGWSSFEEDDYESPNDDQDGEDDGDYESPNEEEEAPVEDDADYEPPPSNDEEALQNSILPAKPFPNSNSMYIDRPPSGKTPQQPPVPPQRPMAALPPPPAGRNHSPLPPPQTNHEEPSRSRKPSIPAGRSLGEHLPKIQKPPLPPTTERHERSSPLPGKKPPVPKHGWGPDRRENDEDDVHQRPLPQPALLPMSSNTFPSRSTKPSPMNPLPSSHMPGAFSESNSSFPQSASLPPYFSQGPSNRPPIRAEGRNFPLPLPNKPRPPSPAEEENSLNEEWYVSYITRPEAEAALRKINQDGTFLVRDSSKKTTTNPYVLMVLYKDKVYNIQIRYQKESQVYLLGTGLRGKEDFLSVSDIIDYFRKMPLLLIDGKNRGSRYQCTLTHAAGYPGNS

SEQ ID NO: 195 - protein, 465 aa, Artificial sequence
  Synthetic polypeptide
GSGGGGSALRNVPFRSEVLGWDPDSLADYFKKLNYKDCEKAVKKYHIDGARFLNLTENDIQKFPKLRVPILSKLSQEINKNEERRSIFTRKPQVPRFPEETESHEEDNGGWSSFEEDDYESPNDDQDGEDDGDYESPNEEEEAPVEDDADYEPPPSNDEEALQNSILPAKPFPNSNSMYIDRPPSGKTPQQPPVPPQRPMAALPPPPAGRNHSPLPPPQTNHEEPSRSRPGKKPPVPKHGWGPDRRENDEDDVHQRPLPQPALLPMSSNTFPSRSTKPSPMNPLPSSHMPGAFSESNSSFPQSASLPPYFSQGPSNRPPIRAEGRNFPLPLPNKPRPPSPAEEENSLNEEWYVSYITRPEAEAALRKINQDGTFLVRDSSKKTTTNPYVLMVLYKDKVYNIQIRYQKESQVYLLGTGLRGKEDFLSVSDIIDYFRKMPLLLIDGKNRGSRYQCTLTHAAGYPGNS

SEQ ID NO: 196 - protein, 802 aa, Artificial sequence
  Synthetic polypeptide
MARSVTLVFLVLVSLTGLYAADIQMTQSPSSLSASVGDRVTITCRASQDVNTAVAWYQQKPGKAPKLLIYSASFLESGVPSRFSGSRSGTDFTLTISSLQPEDFATYYCQQHYTTPPTFGQGTKVEIKGSTSGSGKPGSGEGSGEVQLVESGGGLVQPGGSLRLSCAASGFNIKDTYIHWVRQAPGKGLEWVARIYPTNGYTRYADSVKGRFTISADTSKNTAYLQMNSLRAEDTAVYYCSRWGGDGFYAMDVWGQGTLVTVSSAAATTTPAPRPPTPAPTIASQPLSLRPEACRPAAGGAVHTRGLDFACDIYIWAPLAGTCGVLLLSLVITLYCKGSGGGGSALRNVPFRSEVLGWDPDSLADYFKKLNYKDCEKAVKKYHIDGARFLNLTENDIQKFPKLRVPILSKLSQEINKNEERRSIFTRKPQVPRFPEETESHEEDNGGWSSFEEDDYESPNDDQDGEDDGDYESPNEEEEAPVEDDADYEPPPSNDEEALQNSILPAKPFPNSNSMYIDRPPSGKTPQQPPVPPQRPMAALPPPPAGRNHSPLPPPQTNHEEPSRSRPGKKPPVPKHGWGPDRRENDEDDVHQRPLPQPALLPMSSNTFPSRSTKPSPMNPLPSSHMPGAFSESNSSFPQSASLPPYFSQGPSNRPPIRAEGRNFPLPLPNKPRPPSPAEEENSLNEEWYVSYITRPEAEAALRKINQDGTFLVRDSSKKTTTNPYVLMVLYKDKVYNIQIRYQKESQVYLLGTGLRGKEDFLSVSDIIDYFRKMPLLLIDGKNRGSRYQCTLTHAAGYPGNS

SEQ ID NO: 197 - protein, 272 aa, Artificial sequence
  Synthetic polypeptide
MARSVTLVFLVLVSLTGLYAAYTDIEMNRLGKDTQVQLVESGGGWQPGRSLRLSCAASGFIFSEHNMAWVRQAPGKGLEWVATISDDGRNTYYRDSMRGRFTISRDNSKNTLYLQMNSLRAEDTAVYYCTSHRYNLFDSWGQGTMVTVSSGGGGSGGGGSGGGGSDIQMTQSPSSLSASVGDRVTITCKASQNIDRYLNWYQQKPGKAPKRLIYNTNKLQTGVPSRFSGSGSGTEFTLTISSLQPEDFATYYCLQYNSLPLTFGQGTKLEIK

SEQ ID NO: 198 - protein, 581 aa, Artificial sequence
  Synthetic polypeptide
MARSVTLVFLVLVSLTGLYAAYTDIEMNRLGKDTQVQLVESGGGWQPGRSLRLSCAASGFIFSEHNMAWVRQAPGKGLEWVATISDDGRNTYYRDSMRGRFTISRDNSKNTLYLQMNSLRAEDTAVYYCTSHRYNLFDSWGQGTMVTVSSGGGGSGGGGSGGGGSDIQMTQSPSSLSASVGDRVTITCKASQNIDRYLNWYQQKPGKAPKRLIYNTNKLQTGVPSRFSGSGSGTEFTLTISSLQPEDFATYYCLQYNSLPLTFGQGTKLEIKAAAIEVMYPPPYLDNEKSNGTIIHVKGKHLCPSPLFPGPSKPFWVLVVVGGVLACYSLLVTVAFIIFWVGSHCHRLPGSYDSTSSDSLYPRGIQFKRPHTVAPWPPAYPPVTSYPPLSQPDLLPIPRSPQPLGGSHRTPSSRRDSDGANSVASYENEGASGIRGAQAGWGVWGPSWTRLTPVSLPPEPACEDADEDEDDYHNPGYLVVLPDSTPATSTAAPSAPALSTPGIRDSAFSMESIDDYVNVPESGESAEASLDGSREYVNVSQELHPGAAKTEPAALSSQEAEEVEEEGAPDYENLQELNGNS

SEQ ID NO: 199 - protein, 581 aa, Artificial sequence
  Synthetic polypeptide
MARSVTLVFLVLVSLTGLYAAYTDIEMNRLGKDTQVQLVESGGGWQPGRSLRLSCAASGFIFSEHNMAWVRQAPGKGLEWVATISDDGRNTYYRDSMRGRFTISRDNSKNTLYLQMNSLRAEDTAVYYCTSHRYNLFDSWGQGTMVTVSSGGGGSGGGGSGGGGSDIQMTQSPSSLSASVGDRVTITCKASQNIDRYLNWYQQKPGKAPKRLIYNTNKLQTGVPSRFSGSGSGTEFTLTISSLQPEDFATYYCLQYNSLPLTFGQGTKLEIKAAAIEVMYPPPYLDNEKSNGTIIHVKGKHLAPSPLFPGPSKPFWVLVVVGGVLAAYSLLVTVAFIIFWVGSHCHRLPGSYDSTSSDSLYPRGIQFKRPHTVAPWPPAYPPVTSYPPLSQPDLLPIPRSPQPLGGSHRTPSSRRDSDGANSVASYENEGASGIRGAQAGWGVWGPSWTRLTPVSLPPEPACEDADEDEDDYHNPGYLVVLPDSTPATSTAAPSAPALSTPGIRDSAFSMESIDDYVNVPESGESAEASLDGSREYVNVSQELHPGAAKTEPAALSSQEAEEVEEEGAPDYENLQELNGNS

SEQ ID NO: 200 - protein, 515 aa, Artificial sequence
  Synthetic polypeptide
MARSVTLVFLVLVSLTGLYAAYTDIEMNRLGKDTQVQLVESGGGWQPGRSLRLSCAASGFIFSEHNMAWVRQAPGKGLEWVATISDDGRNTYYRDSMRGRFTISRDNSKNTLYLQMNSLRAEDTAVYYCTSHRYNLFDSWGQGTMVTVSSGGGGSGGGGSGGGGSDIQMTQSPSSLSASVGDRVTITCKASQNIDRYLNWYQQKPGKAPKRLIYNTNKLQTGVPSRFSGSGSGTEFTLTISSLQPEDFATYYCLQYNSLPLTFGQGTKLEIKAAAIEVMYPPPYLDNEKSNGTIIHVKGKHLCPSPLFPGPSKPFWVLVVVGGVLACYSLLVTVAFIIFWVGSHCHRLPGSYDSTSSDSLYPRGIQFKRPHTVAPWPPAYPPVTSYPPLSQPDLLPIPRSPQPLGGSHRTPSSRRDSDGANSVASYENEGASGIRGAQAGWGVWGPSWTRLTPVSLPPEPACEDADEDEDDYHNPGYLVVLPDSTPATSTAAPSAPALSTPGIRDSAFSMESIDD

SEQ ID NO: 201 - protein, 515 aa, Artificial sequence
  Synthetic polypeptide
MARSVTLVFLVLVSLTGLYAAYTDIEMNRLGKDTQVQLVESGGGWQPGRSLRLSCAASGFIFSEHNMAWVRQAPGKGLEWVATISDDGRNTYYRDSMRGRFTISRDNSKNTLYLQMNSLRAEDTAVYYCTSHRYNLFDSWGQGTMVTVSSGGGGSGGGGSGGGGSDIQMTQSPSSLSASVGDRVTITCKASQNIDRYLNWYQQKPGKAPKRLIYNTNKLQTGVPSRFSGSGSGTEFTLTISSLQPEDFATYYCLQYNSLPLTFGQGTKLEIKAAAIEVMYPPPYLDNEKSNGTIIHVKGKHLAPSPLFPGPSKPFWVLVVVGGVLAAYSLLVTVAFIIFWVGSHCHRLPGSYDSTSSDSLYPRGIQFKRPHTVAPWPPAYPPVTSYPPLSQPDLLPIPRSPQPLGGSHRTPSSRRDSDGANSVASYENEGASGIRGAQAGWGVWGPSWTRLTPVSLPPEPACEDADEDEDDYHNPGYLVVLPDSTPATSTAAPSAPALSTPGIRDSAFSMESIDD

SEQ ID NO: 202 - protein, 861 aa, Artificial sequence
  Synthetic polypeptide
MLLLVTSLLLCELPHPAFLLIPDIQMTQTTSSLSASLGDRVTISCRASQDISKYLNWYQQKPDGTVKLLIYHTSRLHSGVPSRFSGSGSGTDYSLTISNLEQEDIATYFCQQGNTLPYTFGGGTKLEITGSTSGSGKPGSGEGSTKGEVKLQESGPGLVAPSQSLSVTCTVSGVSLPDYGVSWIRQPPRKGLEWLGVIWGSETTYYNSALKSRLTIIKDNSKSQVFLKMNSLQTDDTAIYYCAKHYYYGGSYAMDYWGQGTSVTVSSAAATTTPAPRPPTPAPTIASQPLSLRPEACRPAAGGAVHTRGLDFACDIYIWAPLAGTCGVLLLSLVITLYCKGSGGGGSALRNVPFRSEVLGWDPDSLADYFKKLNYKDCEKAVKKYHIDGARFLNLTENDIQKFPKLRVPILSKLSQEINKNEERRSIFTRKPQVPRFPEETESHEEDNGGWSSFEEDDYESPNDDQDGEDDGDYESPNEEEEAPVEDDADYEPPPSNDEEALQNSILPAKPFPNSNSMYIDRPPSGKTPQQPPVPPQRPMAALPPPPAGRNHSPLPPPQTNHEEPSRSRRSLAPFDREPFTLGKKPPFSDKPSIPAGRSLGEHLPKIQKPPLPPTTERHERSSPLPGKKPPVPKHGWGPDRRENDEDDVHQRPLPQPALLPMSSNTFPSRSTKPSPMNPLPSSHMPGAFSESNSSFPQSASLPPYFSQGPSNRPPIRAEGRNFPLPLPNKPRPPSPAEEENSLNEEWYVSYITRPEAEAALRKINQDGTFLVRDSSKKTTTNPYVLMVLYKDKVYNIQIRYQKESQVYLLGTGLRGKEDFLSVSDIIDYFRKMPLLLIDGKNRGSRYQCTLTHAAGYPGNS

SEQ ID NO: 203 - protein, 887 aa, Artificial sequence
  Synthetic polypeptide
MARSVTLVFLVLVSLTGLYAAYTDIEMNRLGKDTQVQLVESGGGWQPGRSLRLSCAASGFIFSEHNMAWVRQAPGKGLEWVATISDDGRNTYYRDSMRGRFTISRDNSKNTLYLQMNSLRAEDTAVYYCTSHRYNLFDSWGQGTMVTVSSGGGGSGGGGSGGGGSDIQMTQSPSSLSASVGDRVTITCKASQNIDRYLNWYQQKPGKAPKRLIYNTNKLQTGVPSRFSGSGSGTEFTLTISSLQPEDFATYYCLQYNSLPLTFGQGTKLEIKAAATTTPAPRPPTPAPTIASQPLSLRPEACRPAAGGAVHTRGLDFACDIYIWAPLAGTCGVLLLSLVITLYCKGSGGGGSALRNVPFRSEVLGWDPDSLADYFKKLNYKDCEKAVKKYHIDGARFLNLTENDIQKFPKLRVPILSKLSQEINKNEERRSIFTRKPQVPRFPEETESHEEDNGGWSSFEEDDYESPNDDQDGEDDGDYESPNEEEEAPVEDDADYEPPPSNDEEALQNSILPAKPFPNSNSMYIDRPPSGKTPQQPPVPPQRPMAALPPPPAGRNHSPLPPPQTNHEEPSRSRNHKTAKLPAPSIDRSTKPPLDRSLAPFDREPFTLGKKPPFSDKPSIPAGRSLGEHLPKIQKPPLPPTTERHERSSPLPGKKPPVPKHGWGPDRRENDEDDVHQRPLPQPALLPMSSNTFPSRSTKPSPMNPLPSSHMPGAFSESNSSFPQSASLPPYFSQGPSNRPPIRAEGRNFPLPLPNKPRPPSPAEEENSLNEEWYVSYITRPEAEAALRKINQDGTFLVRDSSKKTTTNPYVLMVLYKDKVYNIQIRYQKESQVYLLGTGLRGKEDFLSVSDIIDYFRKMPLLLIDGKNRGSRYQCTLTHAAGYPGNS

SEQ ID NO: 204 - protein, 866 aa, Artificial sequence
  Synthetic polypeptide
MARSVTLVFLVLVSLTGLYAAYTDIEMNRLGKDTQVQLVESGGGWQPGRSLRLSCAASGFIFSEHNMAWVRQAPGKGLEWVATISDDGRNTYYRDSMRGRFTISRDNSKNTLYLQMNSLRAEDTAVYYCTSHRYNLFDSWGQGTMVTVSSGGGGSGGGGSGGGGSDIQMTQSPSSLSASVGDRVTITCKASQNIDRYLNWYQQKPGKAPKRLIYNTNKLQTGVPSRFSGSGSGTEFTLTISSLQPEDFATYYCLQYNSLPLTFGQGTKLEIKAAATTTPAPRPPTPAPTIASQPLSLRPEACRPAAGGAVHTRGLDFACDIYIWAPLAGTCGVLLLSLVITLYCKGSGGGGSALRNVPFRSEVLGWDPDSLADYFKKLNYKDCEKAVKKYHIDGARFLNLTENDIQKFPKLRVPILSKLSQEINKNEERRSIFTRKPQVPRFPEETESHEEDNGGWSSFEEDDYESPNDDQDGEDDGDYESPNEEEEAPVEDDADYEPPPSNDEEALQNSILPAKPFPNSNSMYIDRPPSGKTPQQPPVPPQRPMAALPPPPAGRNHSPLPPPQTNHEEPSRSRRSLAPFDREPFTLGKKPPFSDKPSIPAGRSLGEHLPKIQKPPLPPTTERHERSSPLPGKKPPVPKHGWGPDRRENDEDDVHQRPLPQPALLPMSSNTFPSRSTKPSPMNPLPSSHMPGAFSESNSSFPQSASLPPYFSQGPSNRPPIRAEGRNFPLPLPNKPRPPSPAEEENSLNEEWYVSYITRPEAEAALRKINQDGTFLVRDSSKKTTTNPYVLMVLYKDKVYNIQIRYQKESQVYLLGTGLRGKEDFLSVSDIIDYFRKMPLLLIDGKNRGSRYQCTLTHAAGYPGNS

SEQ ID NO: 205 - DNA, 798 bp, Artificial sequence
  Synthetic polynucleotide
atgctgctgctcgtgacatctctgctgctgtgcgagctgccccaccccgcctttctgctgatccccgatatcctgctgacccagacccctctgagcctgcctgtgtctctgggcgatcaggccagcatcagctgcagatccagccagagcctggtgcaccggaacggcaacacctacctgcactggtatctgcagaagcccggccagagccccaagctgctgattcacaaggtgtccaaccggttcagcggcgtgcccgacagattttctggcagcggctccggcaccgacttcaccctgaagatcagccgggtggaagccgaggacctgggcgtgtacttctgcagccagtccacccacgtgccccccctgacatttggcgccggaacaaagctggaactgaagggcagcacaagcggcagcggcaagcctggatctggcgagggaagcaccaagggcgaagtgaagctgcagcagagcggcccctctctggtggaacctggcgcctctgtgatgatctcctgcaaggccagcggcagctccttcaccggctacaacatgaactgggtgcgccagaacatcggcaagagcctggaatggatcggcgccatcgacccctactacggcggcaccagctacaaccagaagttcaagggcagagccaccctgaccgtggacaagagcagctccaccgcctacatgcacctgaagtccctgaccagcgaggacagcgccgtgtactactgcgtgtccggcatggaatactggggccagggcacaagcgtgaccgtgtcctct

SEQ ID NO: 206 - DNA, 2073 bp, Artificial sequence
  Synthetic polynucleotide
atgctgctgctcgtgacatctctgctgctgtgcgagctgccccaccccgcctttctgctgatccccgatatcctgctgacccagacccctctgagcctgcctgtgtctctgggcgatcaggccagcatcagctgcagatccagccagagcctggtgcaccggaacggcaacacctacctgcactggtatctgcagaagcccggccagagccccaagctgctgattcacaaggtgtccaaccggttcagcggcgtgcccgacagattttctggcagcggctccggcaccgacttcaccctgaagatcagccgggtggaagccgaggacctgggcgtgtacttctgcagccagtccacccacgtgccccccctgacatttggcgccggaacaaagctggaactgaagggcagcacaagcggcagcggcaagcctggatctggcgagggaagcaccaagggcgaagtgaagctgcagcagagcggcccctctctggtggaacctggcgcctctgtgatgatctcctgcaaggccagcggcagctccttcaccggctacaacatgaactgggtgcgccagaacatcggcaagagcctggaatggatcggcgccatcgacccctactacggcggcaccagctacaaccagaagttcaagggcagagccaccctgaccgtggacaagagcagctccaccgcctacatgcacctgaagtccctgaccagcgaggacagcgccgtgtactactgcgtgtccggcatggaatactggggccagggcacaagcgtgaccgtgtcctctgcggccgcaaccacgacgccagcgccgcgaccaccaacaccggcgcccaccatcgcgtcgcagcccctgtccctgcgcccagaggcgtgccggccagcggcggggggcgcagtgcacacgagggggctggacttcgcctgtgatatctacatctgggcgcccttggccgggacttgtggggtccttctcctgtcactggttatcaccctttactgcaaaggatcccctaacagcagcgcctctaatgctagcggagctgctgctcctacactgcctgctcacccttctacactgacacaccctcagcggcggatcgatacactgaactctgatggctacacccctgagccagccagaatcacaagccccgacaagcccagacctatgcctatggataccagcgtgtacgagagcccctacagcgaccctgaggaactgaaggacaagaagctgttcctgaagcgggacaacctgctgattgccgacatcgaactcggctgcggcaattttggctctgtcagacagggcgtgtaccggatgcggaagaaacagatcgacgtggccatcaaggtgctgaagcagggaaccgagaaggccgataccgaggaaatgatgcgcgaggcccagatcatgcaccagctggacaatccttacatcgtgcggctgatcggcgtgtgtcaagccgaagctctgatgctggttatggaaatggcaggcggcggacccctgcacaagtttctcgttggcaagagagaggaaatccccgtcagcaacgtggccgaactgctgcaccaagtgtctatgggcatgaagtacctggaagagaagaacttcgtgcaccgcgacctggccgccagaaatgtgctgctggtcaacagacactacgccaagatcagcgacttcggcctgtctaaagccctgggcgccgacgatagctactacacagccagatctgccggaaagtggcccctgaagtggtacgcccctgagtgcatcaacttcagaaagttcagcagccgcagcgacgtgtggtcttacggcgttacaatgtgggaagccctgagctacggccagaaaccttacaagaagatgaagggccccgaagtcatggccttcatcgaacagggcaagagaatggaatgccctcctgagtgccctccagagctgtatgccctgatgagcgactgctggatctataagtgggaagatcggcccgacttcctgaccgtggaacagagaatgagagcctgctactacagcctggggaattcctga

SEQ ID NO: 207 - DNA, 1056 bp, Artificial sequence
  Synthetic polynucleotide
ggatcccctaacagcagcgcctctaatgctagcggagctgctgctcctacactgcctgctcacccttctacactgacacaccctcagcggcggatcgatacactgaactctgatggctacacccctgagccagccagaatcacaagccccgacaagcccagacctatgcctatggataccagcgcgtacgagagcccctacagcgaccctgaggaactgaaggacaagaagctgttcctgaagcgggacaacctgctgattgccgacatcgaactcggctgcggcaattttggctctgtcagacagggcgtgtaccggatgcggaagaaacagatcgacgtggccatcaaggtgctgaagcagggaaccgagaaggccgataccgaggaaatgatgcgcgaggcccagatcatgcaccagctggacaatccttacatcgtgcggctgatcggcgtgtgtcaagccgaagctctgatgctggttatggaaatggcaggcggcggacccctgcacaagtttctcgttggcaagagagaggaaatccccgtcagcaacgtggccgaactgctgcaccaagtgtctatgggcatgaagtacctggaagagaagaacttcgtgcaccgcgacctggccgccagaaatgtgctgctggtcaacagacactacgccaagatcagcgacttcggcctgtctaaagccctgggcgccgacgatagctactacacagccagatctgccggaaagtggcccctgaagtggtacgcccctgagtgcatcaacttcagaaagttcagcagccgcagcgacgtgtggtcttacggcgttacaatgtgggaagccctgagctacggccagaaaccttacaagaagatgaagggccccgaagtcatggccttcatcgaacagggcaagagaatggaatgccctcctgagtgccctccagagctgtatgccctgatgagcgactgctggatctataagtgggaagatcggcccgacttcctgaccgtggaacagagaatgagagcctgctactacagcctggggaattcctga

SEQ ID NO: 208 - DNA, 2073 bp, Artificial sequence
  Synthetic polynucleotide
atggttgccaccctgctcgtgacaagcctgctgctgtgcgagctgccccaccctgcctttctgctgatccccgataccgaggtgcagctggtggaatctggcggcggactggtgcagcctggcggatctctgagactgagctgtgccgccagcggcttcaccttcagcagcttcggaatgcactgggtgcgccaggcccctggcaaaggactggaatgggtggcctacatcagcagcgacagcagcgccatctactacgccgacaccgtgaagggccggttcaccatctcccgggacaacgccaagaacagcctgtacctgcagatgaactccctgcgggacgaggacaccgccgtgtactattgcggcagaggcagagagaacatctattacggcagcagactggactactggggccagggcacaaccgtgacagtgtctagcggaggcggaggatcaggcggcggaggaagtggcggagggggatctgatatccagctgacccagagccccagcttcctgagcgcctctgtgggcgacagagtgaccatcacatgcaaggccagccagaacgtggacaccaacgtggcctggtatcagcagaagcccggcaaggcccctaaggccctgatctacagcgccagctaccggtacagcggcgtgcccagcagattttctggcagcggctccggcaccgacttcaccctgacaatcagcagcctgcagcccgaggacttcgccacctactactgccagcagtacaacaactaccctttcaccttcggccaggggaccaagctggaaatcaaagcggccgcaatcgaagtgatgtaccctccaccttacctggacaacgagaagtccaacggcaccatcatccacgtgaagggcaagcacctgtgtccttctccactgttccctggacctagcaagcctttctgggtgctcgtggttgttggcggcgtgctggcctgttattctctgctggtcaccgtggccttcatcatcttttgggtcggatcccctaacagcagcgcctctaatgctagcggagctgctgctcctacactgcctgctcacccttctacactgacacaccctcagcggcggatcgatacactgaactctgatggctacacccctgagccagccagaatcacaagccccgacaagcccagacctatgcctatggataccagcgcgtacgagagcccctacagcgaccctgaggaactgaaggacaagaagctgttcctgaagcgggacaacctgctgattgccgacatcgaactcggctgcggcaattttggctctgtcagacagggcgtgtaccggatgcggaagaaacagatcgacgtggccatcaaggtgctgaagcagggaaccgagaaggccgataccgaggaaatgatgcgcgaggcccagatcatgcaccagctggacaatccttacatcgtgcggctgatcggcgtgtgtcaagccgaagctctgatgctggttatggaaatggcaggcggcggacccctgcacaagtttctcgttggcaagagagaggaaatccccgtcagcaacgtggccgaactgctgcaccaagtgtctatgggcatgaagtacctggaagagaagaacttcgtgcaccgcgacctggccgccagaaatgtgctgctggtcaacagacactacgccaagatcagcgacttcggcctgtctaaagccctgggcgccgacgatagctactacacagccagatctgccggaaagtggcccctgaagtggtacgcccctgagtgcatcaacttcagaaagttcagcagccgcagcgacgtgtggtcttacggcgttacaatgtgggaagccctgagctacggccagaaaccttacaagaagatgaagggccccgaagtcatggccttcatcgaacagggcaagagaatggaatgccctcctgagtgccctccagagctgtatgccctgatgagcgactgctggatctataagtgggaagatcggcccgacttcctgaccgtggaacagagaatgagagcctgctactacagcctggggaattcctga

SEQ ID NO: 209 - DNA, 1056 bp, Artificial sequence
  Synthetic polynucleotide
ggatcccctaacagcagcgcctctaatgctagcggagctgctgctcctacactgcctgctcacccttctacactgacacaccctcagcggcggatcgatacactgaactctgatggctacacccctgagccagccagaatcacaagccccgacaagcccagacctatgcctatggataccagcgtgtacgagagcccctacagcgaccctgaggaactgaagcccaagaagctgttcctgaagcgggacaacctgctgattgccgacatcgaactcggctgcggcaattttggctctgtcagacagggcgtgtaccggatgcggaagaaacagatcgacgtggccatcaaggtgctgaagcagggaaccgagaaggccgataccgaggaaatgatgcgcgaggcccagatcatgcaccagctggacaatccttacatcgtgcggctgatcggcgtgtgtcaagccgaagctctgatgctggttatggaaatggcaggcggcggacccctgcacaagtttctcgttggcaagagagaggaaatccccgtcagcaacgtggccgaactgctgcaccaagtgtctatgggcatgaagtacctggaagagaagaacttcgtgcaccgcgacctggccgccagaaatgtgctgctggtcaacagacactacgccaagatcagcgacttcggcctgtctaaagccctgggcgccgacgatagctactacacagccagatctgccggaaagtggcccctgaagtggtacgcccctgagtgcatcaacttcagaaagttcagcagccgcagcgacgtgtggtcttacggcgttacaatgtgggaagccctgagctacggccagaaaccttacaagaagatgaagggccccgaagtcatggccttcatcgaacagggcaagagaatggaatgccctcctgagtgccctccagagctgtatgccctgatgagcgactgctggatctataagtgggaagatcggcccgacttcctgaccgtggaacagagaatgagagcctgctactacagcctggggaattcctga

SEQ ID NO: 210 - DNA, 2073 bp, Artificial sequence
  Synthetic polynucleotide
atggttgccaccctgctcgtgacaagcctgctgctgtgcgagctgccccaccctgcctttctgctgatccccgataccgaggtgcagctggtggaatctggcggcggactggtgcagcctggcggatctctgagactgagctgtgccgccagcggcttcaccttcagcagcttcggaatgcactgggtgcgccaggcccctggcaaaggactggaatgggtggcctacatcagcagcgacagcagcgccatctactacgccgacaccgtgaagggccggttcaccatctcccgggacaacgccaagaacagcctgtacctgcagatgaactccctgcgggacgaggacaccgccgtgtactattgcggcagaggcagagagaacatctattacggcagcagactggactactggggccagggcacaaccgtgacagtgtctagcggaggcggaggatcaggcggcggaggaagtggcggagggggatctgatatccagctgacccagagccccagcttcctgagcgcctctgtgggcgacagagtgaccatcacatgcaaggccagccagaacgtggacaccaacgtggcctggtatcagcagaagcccggcaaggcccctaaggccctgatctacagcgccagctaccggtacagcggcgtgcccagcagattttctggcagcggctccggcaccgacttcaccctgacaatcagcagcctgcagcccgaggacttcgccacctactactgccagcagtacaacaactaccctttcaccttcggccaggggaccaagctggaaatcaaagcggccgcaatcgaagtgatgtaccctccaccttacctggacaacgagaagtccaacggcaccatcatccacgtgaagggcaagcacctgtgtccttctccactgttccctggacctagcaagcctttctgggtgctcgtggttgttggcggcgtgctggcctgttattctctgctggtcaccgtggccttcatcatcttttgggtcggatcccctaacagcagcgcctctaatgctagcggagctgctgctcctacactgcctgctcacccttctacactgacacaccctcagcggcggatcgatacactgaactctgatggctacacccctgagccagccagaatcacaagccccgacaagcccagacctatgcctatggataccagcgtgtacgagagcccctacagcgaccctgaggaactgaagcccaagaagctgttcctgaagcgggacaacctgctgattgccgacatcgaactcggctgcggcaattttggctctgtcagacagggcgtgtaccggatgcggaagaaacagatcgacgtggccatcaaggtgctgaagcagggaaccgagaaggccgataccgaggaaatgatgcgcgaggcccagatcatgcaccagctggacaatccttacatcgtgcggctgatcggcgtgtgtcaagccgaagctctgatgctggttatggaaatggcaggcggcggacccctgcacaagtttctcgttggcaagagagaggaaatccccgtcagcaacgtggccgaactgctgcaccaagtgtctatgggcatgaagtacctggaagagaagaacttcgtgcaccgcgacctggccgccagaaatgtgctgctggtcaacagacactacgccaagatcagcgacttcggcctgtctaaagccctgggcgccgacgatagctactacacagccagatctgccggaaagtggcccctgaagtggtacgcccctgagtgcatcaacttcagaaagttcagcagccgcagcgacgtgtggtcttacggcgttacaatgtgggaagccctgagctacggccagaaaccttacaagaagatgaagggccccgaagtcatggccttcatcgaacagggcaagagaatggaatgccctcctgagtgccctccagagctgtatgccctgatgagcgactgctggatctataagtgggaagatcggcccgacttcctgaccgtggaacagagaatgagagcctgctactacagcctggggaattcctga

SEQ ID NO: 211 - DNA, 1056 bp, Artificial sequence
  Synthetic polynucleotide
ggatcccctaacagcagcgcctctaatgctagcggagctgctgctcctacactgcctgctcacccttctacactgacacaccctcagcggcggatcgatacactgaactctgatggctacacccctgagccagccagaatcacaagccccgacaagcccagacctatgcctatggataccagcgtgtacgagagcccctacagcgaccctgaggaactgaaggacaagaagctgttcctgaagcgggacaacctgctgattgccgacatcgaactcggctgcggcaattttggctctgtcagacagggcgtgtaccggatgccgaagaaacagatcgacgtggccatcaaggtgctgaagcagggaaccgagaaggccgataccgaggaaatgatgcgcgaggcccagatcatgcaccagctggacaatccttacatcgtgcggctgatcggcgtgtgtcaagccgaagctctgatgctggttatggaaatggcaggcggcggacccctgcacaagtttctcgttggcaagagagaggaaatccccgtcagcaacgtggccgaactgctgcaccaagtgtctatgggcatgaagtacctggaagagaagaacttcgtgcaccgcgacctggccgccagaaatgtgctgctggtcaacagacactacgccaagatcagcgacttcggcctgtctaaagccctgggcgccgacgatagctactacacagccagatctgccggaaagtggcccctgaagtggtacgcccctgagtgcatcaacttcagaaagttcagcagccgcagcgacgtgtggtcttacggcgttacaatgtgggaagccctgagctacggccagaaaccttacaagaagatgaagggccccgaagtcatggccttcatcgaacagggcaagagaatggaatgccctcctgagtgccctccagagctgtatgccctgatgagcgactgctggatctataagtgggaagatcggcccgacttcctgaccgtggaacagagaatgagagcctgctactacagcctggggaattcctga

SEQ ID NO: 212 - DNA, 2073 bp, Artificial sequence
  Synthetic polynucleotide
atggttgccaccctgctcgtgacaagcctgctgctgtgcgagctgccccaccctgcctttctgctgatccccgataccgaggtgcagctggtggaatctggcggcggactggtgcagcctggcggatctctgagactgagctgtgccgccagcggcttcaccttcagcagcttcggaatgcactgggtgcgccaggcccctggcaaaggactggaatgggtggcctacatcagcagcgacagcagcgccatctactacgccgacaccgtgaagggccggttcaccatctcccgggacaacgccaagaacagcctgtacctgcagatgaactccctgcgggacgaggacaccgccgtgtactattgcggcagaggcagagagaacatctattacggcagcagactggactactggggccagggcacaaccgtgacagtgtctagcggaggcggaggatcaggcggcggaggaagtggcggagggggatctgatatccagctgacccagagccccagcttcctgagcgcctctgtgggcgacagagtgaccatcacatgcaaggccagccagaacgtggacaccaacgtggcctggtatcagcagaagcccggcaaggcccctaaggccctgatctacagcgccagctaccggtacagcggcgtgcccagcagattttctggcagcggctccggcaccgacttcaccctgacaatcagcagcctgcagcccgaggacttcgccacctactactgccagcagtacaacaactaccctttcaccttcggccaggggaccaagctggaaatcaaagcggccgcaatcgaagtgatgtaccctccaccttacctggacaacgagaagtccaacggcaccatcatccacgtgaagggcaagcacctgtgtccttctccactgttccctggacctagcaagcctttctgggtgctcgtggttgttggcggcgtgctggcctgttattctctgctggtcaccgtggccttcatcatcttttgggtcggatcccctaacagcagcgcctctaatgctagcggagctgctgctcctacactgcctgctcacccttctacactgacacaccctcagcggcggatcgatacactgaactctgatggctacacccctgagccagccagaatcacaagccccgacaagcccagacctatgcctatggataccagcgtgtacgagagcccctacagcgaccctgaggaactgaaggacaagaagctgttcctgaagcgggacaacctgctgattgccgacatcgaactcggctgcggcaattttggctctgtcagacagggcgtgtaccggatgccgaagaaacagatcgacgtggccatcaaggtgctgaagcagggaaccgagaaggccgataccgaggaaatgatgcgcgaggcccagatcatgcaccagctggacaatccttacatcgtgcggctgatcggcgtgtgtcaagccgaagctctgatgctggttatggaaatggcaggcggcggacccctgcacaagtttctcgttggcaagagagaggaaatccccgtcagcaacgtggccgaactgctgcaccaagtgtctatgggcatgaagtacctggaagagaagaacttcgtgcaccgcgacctggccgccagaaatgtgctgctggtcaacagacactacgccaagatcagcgacttcggcctgtctaaagccctgggcgccgacgatagctactacacagccagatctgccggaaagtggcccctgaagtggtacgcccctgagtgcatcaacttcagaaagttcagcagccgcagcgacgtgtggtcttacggcgttacaatgtgggaagccctgagctacggccagaaaccttacaagaagatgaagggccccgaagtcatggccttcatcgaacagggcaagagaatggaatgccctcctgagtgccctccagagctgtatgccctgatgagcgactgctggatctataagtgggaagatcggcccgacttcctgaccgtggaacagagaatgagagcctgctactacagcctggggaattcctga

SEQ ID NO: 213 - DNA, 1056 bp, Artificial sequence
  Synthetic polynucleotide
ggatcccctaacagcagcgcctctaatgctagcggagctgctgctcctacactgcctgctcacccttctacactgacacaccctcagcggcggatcgatacactgaactctgatggctacacccctgagccagccagaatcacaagccccgacaagcccagacctatgcctatggataccagcgtgtacgagagcccctacagcgaccctgaggaactgaaggacaagaagctgttcctgaagcgggacaacctgctgattgccgacatcgaactcggctgcggcaattttggctctgtcagacagggcgtgtaccggatgcggaaggaacagatcgacgtggccatcaaggtgctgaagcagggaaccgagaaggccgataccgaggaaatgatgcgcgaggcccagatcatgcaccagctggacaatccttacatcgtgcggctgatcggcgtgtgtcaagccgaagctctgatgctggttatggaaatggcaggcggcggacccctgcacaagtttctcgttggcaagagagaggaaatccccgtcagcaacgtggccgaactgctgcaccaagtgtctatgggcatgaagtacctggaagagaagaacttcgtgcaccgcgacctggccgccagaaatgtgctgctggtcaacagacactacgccaagatcagcgacttcggcctgtctaaagccctgggcgccgacgatagctactacacagccagatctgccggaaagtggcccctgaagtggtacgcccctgagtgcatcaacttcagaaagttcagcagccgcagcgacgtgtggtcttacggcgttacaatgtgggaagccctgagctacggccagaaaccttacaagaagatgaagggccccgaagtcatggccttcatcgaacagggcaagagaatggaatgccctcctgagtgccctccagagctgtatgccctgatgagcgactgctggatctataagtgggaagatcggcccgacttcctgaccgtggaacagagaatgagagcctgctactacagcctggggaattcctga

SEQ ID NO: 214 - DNA, 2073 bp, Artificial sequence
  Synthetic polynucleotide
atggttgccaccctgctcgtgacaagcctgctgctgtgcgagctgccccaccctgcctttctgctgatccccgataccgaggtgcagctggtggaatctggcggcggactggtgcagcctggcggatctctgagactgagctgtgccgccagcggcttcaccttcagcagcttcggaatgcactgggtgcgccaggcccctggcaaaggactggaatgggtggcctacatcagcagcgacagcagcgccatctactacgccgacaccgtgaagggccggttcaccatctcccgggacaacgccaagaacagcctgtacctgcagatgaactccctgcgggacgaggacaccgccgtgtactattgcggcagaggcagagagaacatctattacggcagcagactggactactggggccagggcacaaccgtgacagtgtctagcggaggcggaggatcaggcggcggaggaagtggcggagggggatctgatatccagctgacccagagccccagcttcctgagcgcctctgtgggcgacagagtgaccatcacatgcaaggccagccagaacgtggacaccaacgtggcctggtatcagcagaagcccggcaaggcccctaaggccctgatctacagcgccagctaccggtacagcggcgtgcccagcagattttctggcagcggctccggcaccgacttcaccctgacaatcagcagcctgcagcccgaggacttcgccacctactactgccagcagtacaacaactaccctttcaccttcggccaggggaccaagctggaaatcaaagcggccgcaatcgaagtgatgtaccctccaccttacctggacaacgagaagtccaacggcaccatcatccacgtgaagggcaagcacctgtgtccttctccactgttccctggacctagcaagcctttctgggtgctcgtggttgttggcggcgtgctggcctgttattctctgctggtcaccgtggccttcatcatcttttgggtcggatcccctaacagcagcgcctctaatgctagcggagctgctgctcctacactgcctgctcacccttctacactgacacaccctcagcggcggatcgatacactgaactctgatggctacacccctgagccagccagaatcacaagccccgacaagcccagacctatgcctatggataccagcgtgtacgagagcccctacagcgaccctgaggaactgaaggacaagaagctgttcctgaagcgggacaacctgctgattgccgacatcgaactcggctgcggcaattttggctctgtcagacagggcgtgtaccggatgcggaaggaacagatcgacgtggccatcaaggtgctgaagcagggaaccgagaaggccgataccgaggaaatgatgcgcgaggcccagatcatgcaccagctggacaatccttacatcgtgcggctgatcggcgtgtgtcaagccgaagctctgatgctggttatggaaatggcaggcggcggacccctgcacaagtttctcgttggcaagagagaggaaatccccgtcagcaacgtggccgaactgctgcaccaagtgtctatgggcatgaagtacctggaagagaagaacttcgtgcaccgcgacctggccgccagaaatgtgctgctggtcaacagacactacgccaagatcagcgacttcggcctgtctaaagccctgggcgccgacgatagctactacacagccagatctgccggaaagtggcccctgaagtggtacgcccctgagtgcatcaacttcagaaagttcagcagccgcagcgacgtgtggtcttacggcgttacaatgtgggaagccctgagctacggccagaaaccttacaagaagatgaagggccccgaagtcatggccttcatcgaacagggcaagagaatggaatgccctcctgagtgccctccagagctgtatgccctgatgagcgactgctggatctataagtgggaagatcggcccgacttcctgaccgtggaacagagaatgagagcctgctactacagcctggggaattcctga

SEQ ID NO: 215 - DNA, 2199 bp, Artificial sequence
  Synthetic polynucleotide
atggttgccaccctgctcgtgacaagcctgctgctgtgcgagctgccccaccctgcctttctgctgatccccgataccgaggtgcagctggtggaatctggcggcggactggtgcagcctggcggatctctgagactgagctgtgccgccagcggcttcaccttcagcagcttcggaatgcactgggtgcgccaggcccctggcaaaggactggaatgggtggcctacatcagcagcgacagcagcgccatctactacgccgacaccgtgaagggccggttcaccatctcccgggacaacgccaagaacagcctgtacctgcagatgaactccctgcgggacgaggacaccgccgtgtactattgcggcagaggcagagagaacatctattacggcagcagactggactactggggccagggcacaaccgtgacagtgtctagcggaggcggaggatcaggcggcggaggaagtggcggagggggatctgatatccagctgacccagagccccagcttcctgagcgcctctgtgggcgacagagtgaccatcacatgcaaggccagccagaacgtggacaccaacgtggcctggtatcagcagaagcccggcaaggcccctaaggccctgatctacagcgccagctaccggtacagcggcgtgcccagcagattttctggcagcggctccggcaccgacttcaccctgacaatcagcagcctgcagcccgaggacttcgccacctactactgccagcagtacaacaactaccctttcaccttcggccaggggaccaagctggaaatcaaagcggccgcaatcgaagtgatgtaccctccaccttacctggacaacgagaagtccaacggcaccatcatccacgtgaagggcaagcacctgtgtccttctccactgttccctggacctagcaagcctttctgggtgctcgtggttgttggcggcgtgctggcctgttattctctgctggtcaccgtggccttcatcatcttttgggtcaagcggggcagaaagaagctgctgtacatcttcaagcagcccttcatgcggcccgtgcagaccacacaagaggaagatggctgctcctgcagattccccgaggaagaagaaggcggctgcgagctgggatcccctaacagcagcgcctctaatgctagcggagctgctgctcctacactgcctgctcacccttctacactgacacaccctcagcggcggatcgatacactgaactctgatggcttcacccctgagccagccagaatcacaagccccgacaagcccagacctatgcctatggataccagcgtgtacgagagcccctacagcgaccctgaggaactgaaggacaagaagctgttcctgaagcgggacaacctgctgattgccgacatcgaactcggctgcggcaattttggctctgtcagacagggcgtgtaccggatgcggaagaaacagatcgacgtggccatcaaggtgctgaagcagggaaccgagaaggccgataccgaggaaatgatgcgcgaggcccagatcatgcaccagctggacaatccttacatcgtgcggctgatcggcgtgtgtcaagccgaagctctgatgctggttatggaaatggcaggcggcggacccctgcacaagtttctcgttggcaagagagaggaaatccccgtcagcaacgtggccgaactgctgcaccaagtgtctatgggcatgaagtacctggaagagaagaacttcgtgcaccgcgacctggccgccagaaatgtgctgctggtcaacagacactacgccaagatcagcgacttcggcctgtctaaagccctgggcgccgacgatagctactacacagccagatctgccggaaagtggcccctgaagtggtacgcccctgagtgcatcaacttcagaaagttcagcagccgcagcgacgtgtggtcttacggcgttacaatgtgggaagccctgagctacggccagaaaccttacaagaagatgaagggccccgaagtcatggccttcatcgaacagggcaagagaatggaatgccctcctgagtgccctccagagctgtatgccctgatgagcgactgctggatctataagtgggaagatcggcccgacttcctgaccgtggaacagagaatgagagcctgctactacagcctggggaattcctga

SEQ ID NO: 216 - DNA, 2064 bp, Artificial sequence
  Synthetic polynucleotide
atgctgctgctcgtgacatctctgctgctgtgcgagctgccccaccccgcctttctgctgatccccgacatccagatgacccagaccaccagcagcctgagcgccagcctgggcgatagagtgaccatcagctgcagagccagccaggacatcagcaagtacctgaactggtatcagcagaaacccgacggcaccgtgaagctgctgatctaccacaccagcagactgcacagcggcgtgcccagcagattttctggcagcggctccggcaccgactacagcctgaccatctccaacctggaacaggaagatatcgctacctacttctgtcagcaaggcaacaccctgccctacaccttcggcggaggcaccaagctggaaatcaccggcagcacaagcggcagcggcaagcctggatctggcgagggaagcaccaagggcgaagtgaaactgcaggaaagcggccctggactggtggccccaagccagtctctgagcgtgacctgtaccgtgtccggcgtgtccctgcctgactatggcgtgtcctggatcagacagccccccagaaagggcctggaatggctgggagtgatctggggcagcgagacaacctactacaacagcgccctgaagtcccggctgaccatcatcaaggacaactccaagagccaggtgttcctgaagatgaacagcctgcagaccgacgacaccgccatctactactgcgccaagcactactactacggcggcagctacgctatggactactggggccagggcaccagcgtgaccgtgtcatctgcggccgcaatcgaagtgatgtaccctccaccttacctggacaacgagaagtccaacggcaccatcatccacgtgaagggcaagcacctgtgtccttctccactgttccctggacctagcaagcctttctgggtgctcgtggttgttggcggcgtgctggcctgttattctctgctggtcaccgtggccttcatcatcttttgggtcggatcccctaacagcagcgcctctaatgctagcggagctgctgctcctacactgcctgctcacccttctacactgacacaccctcagcggcggatcgatacactgaactctgatggcttcacccctgagccagccagaatcacaagccccgacaagcccagacctatgcctatggataccagcgtgtacgagagcccctacagcgaccctgaggaactgaaggacaagaagctgttcctgaagcgggacaacctgctgattgccgacatcgaactcggctgcggcaattttggctctgtcagacagggcgtgtaccggatgcggaagaaacagatcgacgtggccatcaaggtgctgaagcagggaaccgagaaggccgataccgaggaaatgatgcgcgaggcccagatcatgcaccagctggacaatccttacatcgtgcggctgatcggcgtgtgtcaagccgaagctctgatgctggttatggaaatggcaggcggcggacccctgcacaagtttctcgttggcaagagagaggaaatccccgtcagcaacgtggccgaactgctgcaccaagtgtctatgggcatgaagtacctggaagagaagaacttcgtgcaccgcgacctggccgccagaaatgtgctgctggtcaacagacactacgccaagatcagcgacttcggcctgtctaaagccctgggcgccgacgatagctactacacagccagatctgccggaaagtggcccctgaagtggtacgcccctgagtgcatcaacttcagaaagttcagcagccgcagcgacgtgtggtcttacggcgttacaatgtgggaagccctgagctacggccagaaaccttacaagaagatgaagggccccgaagtcatggccttcatcgaacagggcaagagaatggaatgccctcctgagtgccctccagagctgtatgccctgatgagcgactgctggatctataagtgggaagatcggcccgacttcctgaccgtggaacagagaatgagagcctgctactacagcctggggaattcctga

SEQ ID NO: 217 - DNA, 2187 bp, Artificial sequence
  Synthetic polynucleotide
atgctgctgctcgtgacatctctgctgctgtgcgagctgccccaccccgcctttctgctgatccccgacatccagatgacccagaccaccagcagcctgagcgccagcctgggcgatagagtgaccatcagctgcagagccagccaggacatcagcaagtacctgaactggtatcagcagaaacccgacggcaccgtgaagctgctgatctaccacaccagcagactgcacagcggcgtgcccagcagattttctggcagcggctccggcaccgactacagcctgaccatctccaacctggaacaggaagatatcgctacctacttctgtcagcaaggcaacaccctgccctacaccttcggcggaggcaccaagctggaaatcaccggcagcacaagcggcagcggcaagcctggatctggcgagggaagcaccaagggcgaagtgaaactgcaggaaagcggccctggactggtggccccaagccagtctctgagcgtgacctgtaccgtgtccggcgtgtccctgcctgactatggcgtgtcctggatcagacagccccccagaaagggcctggaatggctgggagtgatctggggcagcgagacaacctactacaacagcgccctgaagtcccggctgaccatcatcaaggacaactccaagagccaggtgttcctgaagatgaacagcctgcagaccgacgacaccgccatctactactgcgccaagcactactactacggcggcagctacgctatggactactggggccagggcaccagcgtgaccgtgtcatctgcggccgcaatcgaagtgatgtaccctccaccttacctggacaacgagaagtccaacggcaccatcatccacgtgaagggcaagcacctgtgtccttctccactgttccctggacctagcaagcctttctgggtgctcgtggttgttggcggcgtgctggcctgttattctctgctggtcaccgtggccttcatcatcttttgggtcaggagtaagaggagcaggctcctgcacagtgactacatgaacatgactccccgccgccccgggcccacccgcaagcattaccagccctatgccccaccacgcgacttcgcagcctatcgctccggatcccctaacagcagcgcctctaatgctagcggagctgctgctcctacactgcctgctcacccttctacactgacacaccctcagcggcggatcgatacactgaactctgatggctacacccctgagccagccagaatcacaagccccgacaagcccagacctatgcctatggataccagcgtgtacgagagcccctacagcgaccctgaggaactgaaggacaagaagctgttcctgaagcgggacaacctgctgattgccgacatcgaactcggctgcggcaattttggctctgtcagacagggcgtgtaccggatgcggaagaaacagatcgacgtggccatcaaggtgctgaagcagggaaccgagaaggccgataccgaggaaatgatgcgcgaggcccagatcatgcaccagctggacaatccttacatcgtgcggctgatcggcgtgtgtcaagccgaagctctgatgctggttatggaaatggcaggcggcggacccctgcacaagtttctcgttggcaagagagaggaaatccccgtcagcaacgtggccgaactgctgcaccaagtgtctatgggcatgaagtacctggaagagaagaacttcgtgcaccgcgacctggccgccagaaatgtgctgctggtcaacagacactacgccaagatcagcgacttcggcctgtctaaagccctgggcgccgacgatagctactacacagccagatctgccggaaagtggcccctgaagtggtacgcccctgagtgcatcaacttcagaaagttcagcagccgcagcgacgtgtggtcttacggcgttacaatgtgggaagccctgagctacggccagaaaccttacaagaagatgaagggccccgaagtcatggccttcatcgaacagggcaagagaatggaatgccctcctgagtgccctccagagctgtatgccctgatgagcgactgctggatctataagtgggaagatcggcccgacttcctgaccgtggaacagagaatgagagcctgctactacagcctggggaattcctga

SEQ ID NO: 218 - DNA, 2190 bp, Artificial sequence
  Synthetic polynucleotide
atgctgctgctcgtgacatctctgctgctgtgcgagctgccccaccccgcctttctgctgatccccgacatccagatgacccagaccaccagcagcctgagcgccagcctgggcgatagagtgaccatcagctgcagagccagccaggacatcagcaagtacctgaactggtatcagcagaaacccgacggcaccgtgaagctgctgatctaccacaccagcagactgcacagcggcgtgcccagcagattttctggcagcggctccggcaccgactacagcctgaccatctccaacctggaacaggaagatatcgctacctacttctgtcagcaaggcaacaccctgccctacaccttcggcggaggcaccaagctggaaatcaccggcagcacaagcggcagcggcaagcctggatctggcgagggaagcaccaagggcgaagtgaaactgcaggaaagcggccctggactggtggccccaagccagtctctgagcgtgacctgtaccgtgtccggcgtgtccctgcctgactatggcgtgtcctggatcagacagccccccagaaagggcctggaatggctgggagtgatctggggcagcgagacaacctactacaacagcgccctgaagtcccggctgaccatcatcaaggacaactccaagagccaggtgttcctgaagatgaacagcctgcagaccgacgacaccgccatctactactgcgccaagcactactactacggcggcagctacgctatggactactggggccagggcaccagcgtgaccgtgtcatctgcggccgcaatcgaagtgatgtaccctccaccttacctggacaacgagaagtccaacggcaccatcatccacgtgaagggcaagcacctgtgtccttctccactgttccctggacctagcaagcctttctgggtgctcgtggttgttggcggcgtgctggcctgttattctctgctggtcaccgtggccttcatcatcttttgggtcaagcggggcagaaagaagctgctgtacatcttcaagcagcccttcatgcggcccgtgcagaccacacaagaggaagatggctgctcctgcagattccccgaggaagaagaaggcggctgcgagctgggatcccctaacagcagcgcctctaatgctagcggagctgctgctcctacactgcctgctcacccttctacactgacacaccctcagcggcggatcgatacactgaactctgatggctacacccctgagccagccagaatcacaagccccgacaagcccagacctatgcctatggataccagcgtgtacgagagcccctacagcgaccctgaggaactgaaggacaagaagctgttcctgaagcgggacaacctgctgattgccgacatcgaactcggctgcggcaattttggctctgtcagacagggcgtgtaccggatgcggaagaaacagatcgacgtggccatcaaggtgctgaagcagggaaccgagaaggccgataccgaggaaatgatgcgcgaggcccagatcatgcaccagctggacaatccttacatcgtgcggctgatcggcgtgtgtcaagccgaagctctgatgctggttatggaaatggcaggcggcggacccctgcacaagtttctcgttggcaagagagaggaaatccccgtcagcaacgtggccgaactgctgcaccaagtgtctatgggcatgaagtacctggaagagaagaacttcgtgcaccgcgacctggccgccagaaatgtgctgctggtcaacagacactacgccaagatcagcgacttcggcctgtctaaagccctgggcgccgacgatagctactacacagccagatctgccggaaagtggcccctgaagtggtacgcccctgagtgcatcaacttcagaaagttcagcagccgcagcgacgtgtggtcttacggcgttacaatgtgggaagccctgagctacggccagaaaccttacaagaagatgaagggccccgaagtcatggccttcatcgaacagggcaagagaatggaatgccctcctgagtgccctccagagctgtatgccctgatgagcgactgctggatctataagtgggaagatcggcccgacttcctgaccgtggaacagagaatgagagcctgctactacagcctggggaattcctga

SEQ ID NO: 219 - DNA, 2187 bp, Artificial sequence
  Synthetic polynucleotide
atgctgctgctcgtgacatctctgctgctgtgcgagctgccccaccccgcctttctgctgatccccgacatccagatgacccagaccaccagcagcctgagcgccagcctgggcgatagagtgaccatcagctgcagagccagccaggacatcagcaagtacctgaactggtatcagcagaaacccgacggcaccgtgaagctgctgatctaccacaccagcagactgcacagcggcgtgcccagcagattttctggcagcggctccggcaccgactacagcctgaccatctccaacctggaacaggaagatatcgctacctacttctgtcagcaaggcaacaccctgccctacaccttcggcggaggcaccaagctggaaatcaccggcagcacaagcggcagcggcaagcctggatctggcgagggaagcaccaagggcgaagtgaaactgcaggaaagcggccctggactggtggccccaagccagtctctgagcgtgacctgtaccgtgtccggcgtgtccctgcctgactatggcgtgtcctggatcagacagccccccagaaagggcctggaatggctgggagtgatctggggcagcgagacaacctactacaacagcgccctgaagtcccggctgaccatcatcaaggacaactccaagagccaggtgttcctgaagatgaacagcctgcagaccgacgacaccgccatctactactgcgccaagcactactactacggcggcagctacgctatggactactggggccagggcaccagcgtgaccgtgtcatctgcggccgcaatcgaagtgatgtaccctccaccttacctggacaacgagaagtccaacggcaccatcatccacgtgaagggcaagcacctgtgtccttctccactgttccctggacctagcaagcctttctgggtgctcgtggttgttggcggcgtgctggcctgttattctctgctggtcaccgtggccttcatcatcttttgggtcaggagtaagaggagcaggctcctgcacagtgactacatgaacatgactccccgccgccccgggcccacccgcaagcattaccagccctatgccccaccacgcgacttcgcagcctatcgctccggatcccctaacagcagcgcctctaatgctagcggagctgctgctcctacactgcctgctcacccttctacactgacacaccctcagcggcggatcgatacactgaactctgatggcttcacccctgagccagccagaatcacaagccccgacaagcccagacctatgcctatggataccagcgtgtacgagagcccctacagcgaccctgaggaactgaaggacaagaagctgttcctgaagcgggacaacctgctgattgccgacatcgaactcggctgcggcaattttggctctgtcagacagggcgtgtaccggatgcggaagaaacagatcgacgtggccatcaaggtgctgaagcagggaaccgagaaggccgataccgaggaaatgatgcgcgaggcccagatcatgcaccagctggacaatccttacatcgtgcggctgatcggcgtgtgtcaagccgaagctctgatgctggttatggaaatggcaggcggcggacccctgcacaagtttctcgttggcaagagagaggaaatccccgtcagcaacgtggccgaactgctgcaccaagtgtctatgggcatgaagtacctggaagagaagaacttcgtgcaccgcgacctggccgccagaaatgtgctgctggtcaacagacactacgccaagatcagcgacttcggcctgtctaaagccctgggcgccgacgatagctactacacagccagatctgccggaaagtggcccctgaagtggtacgcccctgagtgcatcaacttcagaaagttcagcagccgcagcgacgtgtggtcttacggcgttacaatgtgggaagccctgagctacggccagaaaccttacaagaagatgaagggccccgaagtcatggccttcatcgaacagggcaagagaatggaatgccctcctgagtgccctccagagctgtatgccctgatgagcgactgctggatctataagtgggaagatcggcccgacttcctgaccgtggaacagagaatgagagcctgctactacagcctggggaattcctga

SEQ ID NO: 220 - DNA, 2190 bp, Artificial sequence
  Synthetic polynucleotide
atgctgctgctcgtgacatctctgctgctgtgcgagctgccccaccccgcctttctgctgatccccgacatccagatgacccagaccaccagcagcctgagcgccagcctgggcgatagagtgaccatcagctgcagagccagccaggacatcagcaagtacctgaactggtatcagcagaaacccgacggcaccgtgaagctgctgatctaccacaccagcagactgcacagcggcgtgcccagcagattttctggcagcggctccggcaccgactacagcctgaccatctccaacctggaacaggaagatatcgctacctacttctgtcagcaaggcaacaccctgccctacaccttcggcggaggcaccaagctggaaatcaccggcagcacaagcggcagcggcaagcctggatctggcgagggaagcaccaagggcgaagtgaaactgcaggaaagcggccctggactggtggccccaagccagtctctgagcgtgacctgtaccgtgtccggcgtgtccctgcctgactatggcgtgtcctggatcagacagccccccagaaagggcctggaatggctgggagtgatctggggcagcgagacaacctactacaacagcgccctgaagtcccggctgaccatcatcaaggacaactccaagagccaggtgttcctgaagatgaacagcctgcagaccgacgacaccgccatctactactgcgccaagcactactactacggcggcagctacgctatggactactggggccagggcaccagcgtgaccgtgtcatctgcggccgcaatcgaagtgatgtaccctccaccttacctggacaacgagaagtccaacggcaccatcatccacgtgaagggcaagcacctgtgtccttctccactgttccctggacctagcaagcctttctgggtgctcgtggttgttggcggcgtgctggcctgttattctctgctggtcaccgtggccttcatcatcttttgggtcaagcggggcagaaagaagctgctgtacatcttcaagcagcccttcatgcggcccgtgcagaccacacaagaggaagatggctgctcctgcagattccccgaggaagaagaaggcggctgcgagctgggatcccctaacagcagcgcctctaatgctagcggagctgctgctcctacactgcctgctcacccttctacactgacacaccctcagcggcggatcgatacactgaactctgatggcttcacccctgagccagccagaatcacaagccccgacaagcccagacctatgcctatggataccagcgtgtacgagagcccctacagcgaccctgaggaactgaaggacaagaagctgttcctgaagcgggacaacctgctgattgccgacatcgaactcggctgcggcaattttggctctgtcagacagggcgtgtaccggatgcggaagaaacagatcgacgtggccatcaaggtgctgaagcagggaaccgagaaggccgataccgaggaaatgatgcgcgaggcccagatcatgcaccagctggacaatccttacatcgtgcggctgatcggcgtgtgtcaagccgaagctctgatgctggttatggaaatggcaggcggcggacccctgcacaagtttctcgttggcaagagagaggaaatccccgtcagcaacgtggccgaactgctgcaccaagtgtctatgggcatgaagtacctggaagagaagaacttcgtgcaccgcgacctggccgccagaaatgtgctgctggtcaacagacactacgccaagatcagcgacttcggcctgtctaaagccctgggcgccgacgatagctactacacagccagatctgccggaaagtggcccctgaagtggtacgcccctgagtgcatcaacttcagaaagttcagcagccgcagcgacgtgtggtcttacggcgttacaatgtgggaagccctgagctacggccagaaaccttacaagaagatgaagggccccgaagtcatggccttcatcgaacagggcaagagaatggaatgccctcctgagtgccctccagagctgtatgccctgatgagcgactgctggatctataagtgggaagatcggcccgacttcctgaccgtggaacagagaatgagagcctgctactacagcctggggaattcctga

SEQ ID NO: 221 - DNA, 981 bp, Artificial sequence
  Synthetic polynucleotide
ggatcccctcagcggcggatcgatacactgaactctgatggctacacccctgagccagccagaatcacaagccccgacaagcccagacctatgcctatggataccagcgtgtacgagagcccctacagcgaccctgaggaactgaaggacaagaagctgttcctgaagcgggacaacctgctgattgccgacatcgaactcggctgcggcaattttggctctgtcagacagggcgtgtaccggatgcggaagaaacagatcgacgtggccatcaaggtgctgaagcagggaaccgagaaggccgataccgaggaaatgatgcgcgaggcccagatcatgcaccagctggacaatccttacatcgtgcggctgatcggcgtgtgtcaagccgaagctctgatgctggttatggaaatggcaggcggcggacccctgcacaagtttctcgttggcaagagagaggaaatccccgtcagcaacgtggccgaactgctgcaccaagtgtctatgggcatgaagtacctggaagagaagaacttcgtgcaccgcgacctggccgccagaaatgtgctgctggtcaacagacactacgccaagatcagcgacttcggcctgtctaaagccctgggcgccgacgatagctactacacagccagatctgccggaaagtggcccctgaagtggtacgcccctgagtgcatcaacttcagaaagttcagcagccgcagcgacgtgtggtcttacggcgttacaatgtgggaagccctgagctacggccagaaaccttacaagaagatgaagggccccgaagtcatggccttcatcgaacagggcaagagaatggaatgccctcctgagtgccctccagagctgtatgccctgatgagcgactgctggatctataagtgggaagatcggcccgacttcctgaccgtggaacagagaatgagagcctgctactacagcctggggaattcctga

SEQ ID NO: 222 - DNA, 1998 bp, Artificial sequence
  Synthetic polynucleotide
atggttgccaccctgctcgtgacaagcctgctgctgtgcgagctgccccaccctgcctttctgctgatccccgataccgaggtgcagctggtggaatctggcggcggactggtgcagcctggcggatctctgagactgagctgtgccgccagcggcttcaccttcagcagcttcggaatgcactgggtgcgccaggcccctggcaaaggactggaatgggtggcctacatcagcagcgacagcagcgccatctactacgccgacaccgtgaagggccggttcaccatctcccgggacaacgccaagaacagcctgtacctgcagatgaactccctgcgggacgaggacaccgccgtgtactattgcggcagaggcagagagaacatctattacggcagcagactggactactggggccagggcacaaccgtgacagtgtctagcggaggcggaggatcaggcggcggaggaagtggcggagggggatctgatatccagctgacccagagccccagcttcctgagcgcctctgtgggcgacagagtgaccatcacatgcaaggccagccagaacgtggacaccaacgtggcctggtatcagcagaagcccggcaaggcccctaaggccctgatctacagcgccagctaccggtacagcggcgtgcccagcagattttctggcagcggctccggcaccgacttcaccctgacaatcagcagcctgcagcccgaggacttcgccacctactactgccagcagtacaacaactaccctttcaccttcggccaggggaccaagctggaaatcaaagcggccgcaatcgaagtgatgtaccctccaccttacctggacaacgagaagtccaacggcaccatcatccacgtgaagggcaagcacctgtgtccttctccactgttccctggacctagcaagcctttctgggtgctcgtggttgttggcggcgtgctggcctgttattctctgctggtcaccgtggccttcatcatcttttgggtcggatcccctcagcggcggatcgatacactgaactctgatggctacacccctgagccagccagaatcacaagccccgacaagcccagacctatgcctatggataccagcgtgtacgagagcccctacagcgaccctgaggaactgaaggacaagaagctgttcctgaagcgggacaacctgctgattgccgacatcgaactcggctgcggcaattttggctctgtcagacagggcgtgtaccggatgcggaagaaacagatcgacgtggccatcaaggtgctgaagcagggaaccgagaaggccgataccgaggaaatgatgcgcgaggcccagatcatgcaccagctggacaatccttacatcgtgcggctgatcggcgtgtgtcaagccgaagctctgatgctggttatggaaatggcaggcggcggacccctgcacaagtttctcgttggcaagagagaggaaatccccgtcagcaacgtggccgaactgctgcaccaagtgtctatgggcatgaagtacctggaagagaagaacttcgtgcaccgcgacctggccgccagaaatgtgctgctggtcaacagacactacgccaagatcagcgacttcggcctgtctaaagccctgggcgccgacgatagctactacacagccagatctgccggaaagtggcccctgaagtggtacgcccctgagtgcatcaacttcagaaagttcagcagccgcagcgacgtgtggtcttacggcgttacaatgtgggaagccctgagctacggccagaaaccttacaagaagatgaagggccccgaagtcatggccttcatcgaacagggcaagagaatggaatgccctcctgagtgccctccagagctgtatgccctgatgagcgactgctggatctataagtgggaagatcggcccgacttcctgaccgtggaacagagaatgagagcctgctactacagcctggggaattcctga

SEQ ID NO: 223 - DNA, 897 bp, Artificial sequence
  Synthetic polynucleotide
ggatccatgcctatggataccagcgtgtacgagagcccctacagcgaccctgaggaactgaaggacaagaagctgttcctgaagcgggacaacctgctgattgccgacatcgaactcggctgcggcaattttggctctgtcagacagggcgtgtaccggatgcggaagaaacagatcgacgtggccatcaaggtgctgaagcagggaaccgagaaggccgataccgaggaaatgatgcgcgaggcccagatcatgcaccagctggacaatccttacatcgtgcggctgatcggcgtgtgtcaagccgaagctctgatgctggttatggaaatggcaggcggcggacccctgcacaagtttctcgttggcaagagagaggaaatccccgtcagcaacgtggccgaactgctgcaccaagtgtctatgggcatgaagtacctggaagagaagaacttcgtgcaccgcgacctggccgccagaaatgtgctgctggtcaacagacactacgccaagatcagcgacttcggcctgtctaaagccctgggcgccgacgatagctactacacagccagatctgccggaaagtggcccctgaagtggtacgcccctgagtgcatcaacttcagaaagttcagcagccgcagcgacgtgtggtcttacggcgttacaatgtgggaagccctgagctacggccagaaaccttacaagaagatgaagggccccgaagtcatggccttcatcgaacagggcaagagaatggaatgccctcctgagtgccctccagagctgtatgccctgatgagcgactgctggatctataagtgggaagatcggcccgacttcctgaccgtggaacagagaatgagagcctgctactacagcctggggaattcctga

SEQ ID NO: 224 - DNA, 1914 bp, Artificial sequence
  Synthetic polynucleotide
atggttgccaccctgctcgtgacaagcctgctgctgtgcgagctgccccaccctgcctttctgctgatccccgataccgaggtgcagctggtggaatctggcggcggactggtgcagcctggcggatctctgagactgagctgtgccgccagcggcttcaccttcagcagcttcggaatgcactgggtgcgccaggcccctggcaaaggactggaatgggtggcctacatcagcagcgacagcagcgccatctactacgccgacaccgtgaagggccggttcaccatctcccgggacaacgccaagaacagcctgtacctgcagatgaactccctgcgggacgaggacaccgccgtgtactattgcggcagaggcagagagaacatctattacggcagcagactggactactggggccagggcacaaccgtgacagtgtctagcggaggcggaggatcaggcggcggaggaagtggcggagggggatctgatatccagctgacccagagccccagcttcctgagcgcctctgtgggcgacagagtgaccatcacatgcaaggccagccagaacgtggacaccaacgtggcctggtatcagcagaagcccggcaaggcccctaaggccctgatctacagcgccagctaccggtacagcggcgtgcccagcagattttctggcagcggctccggcaccgacttcaccctgacaatcagcagcctgcagcccgaggacttcgccacctactactgccagcagtacaacaactaccctttcaccttcggccaggggaccaagctggaaatcaaagcggccgcaatcgaagtgatgtaccctccaccttacctggacaacgagaagtccaacggcaccatcatccacgtgaagggcaagcacctgtgtccttctccactgttccctggacctagcaagcctttctgggtgctcgtggttgttggcggcgtgctggcctgttattctctgctggtcaccgtggccttcatcatcttttgggtcggatccatgcctatggataccagcgtgtacgagagcccctacagcgaccctgaggaactgaaggacaagaagctgttcctgaagcgggacaacctgctgattgccgacatcgaactcggctgcggcaattttggctctgtcagacagggcgtgtaccggatgcggaagaaacagatcgacgtggccatcaaggtgctgaagcagggaaccgagaaggccgataccgaggaaatgatgcgcgaggcccagatcatgcaccagctggacaatccttacatcgtgcggctgatcggcgtgtgtcaagccgaagctctgatgctggttatggaaatggcaggcggcggacccctgcacaagtttctcgttggcaagagagaggaaatccccgtcagcaacgtggccgaactgctgcaccaagtgtctatgggcatgaagtacctggaagagaagaacttcgtgcaccgcgacctggccgccagaaatgtgctgctggtcaacagacactacgccaagatcagcgacttcggcctgtctaaagccctgggcgccgacgatagctactacacagccagatctgccggaaagtggcccctgaagtggtacgcccctgagtgcatcaacttcagaaagttcagcagccgcagcgacgtgtggtcttacggcgttacaatgtgggaagccctgagctacggccagaaaccttacaagaagatgaagggccccgaagtcatggccttcatcgaacagggcaagagaatggaatgccctcctgagtgccctccagagctgtatgccctgatgagcgactgctggatctataagtgggaagatcggcccgacttcctgaccgtggaacagagaatgagagcctgctactacagcctggggaattcctga

SEQ ID NO: 225 - DNA, 1740 bp, Artificial sequence
  Synthetic polynucleotide
atggttgccaccctgctcgtgacaagcctgctgctgtgcgagctgccccaccctgcctttctgctgatccccgataccgaggtgcagctggtggaatctggcggcggactggtgcagcctggcggatctctgagactgagctgtgccgccagcggcttcaccttcagcagcttcggaatgcactgggtgcgccaggcccctggcaaaggactggaatgggtggcctacatcagcagcgacagcagcgccatctactacgccgacaccgtgaagggccggttcaccatctcccgggacaacgccaagaacagcctgtacctgcagatgaactccctgcgggacgaggacaccgccgtgtactattgcggcagaggcagagagaacatctattacggcagcagactggactactggggccagggcacaaccgtgacagtgtctagcggaggcggaggatcaggcggcggaggaagtggcggagggggatctgatatccagctgacccagagccccagcttcctgagcgcctctgtgggcgacagagtgaccatcacatgcaaggccagccagaacgtggacaccaacgtggcctggtatcagcagaagcccggcaaggcccctaaggccctgatctacagcgccagctaccggtacagcggcgtgcccagcagattttctggcagcggctccggcaccgacttcaccctgacaatcagcagcctgcagcccgaggacttcgccacctactactgccagcagtacaacaactaccctttcaccttcggccaggggaccaagctggaaatcaaagcggccgcaatcgaagtgatgtaccctccaccttacctggacaacgagaagtccaacggcaccatcatccacgtgaagggcaagcacctgtgtccttctccactgttccctggacctagcaagcctttctgggtgctcgtggttgttggcggcgtgctggcctgttattctctgctggtcaccgtggccttcatcatcttttgggtcggatcccactgtcacagactgcctggcagctacgatagcaccagcagcgacagcctgtatcctcggggcatccagttcaagaggcctcatacagttgccccttggcctcctgcctatcctcctgtgacaagctaccctccactgagccaacctgacctgctgcctattcctagatctcctcagcctctcggcggcagccacagaacacctagcagcagaagagatagcgacggcgccaatagcgtggcctcttatgagaatgagggcgcctctggcattagaggcgctcaagctggatggggagtttggggccctagctggacaagactgacacctgtgtctctgcctccagagcctgcctgtgaagatgccgacgaggacgaggatgactatcacaaccctggctacctggtggtgctgcctgatagcacaccagccacatctacagccgctccatctgctccagctctgagcacacctggcatcagagacagcgccttcagcatggaatccatcgacgactacgtgaacgtgccagagtctggcgaatctgccgaagcctctctggacggctcccgggaatatgtgaatgtgtcccaagaactgcaccctggcgccgctaaaacagaacctgctgctctgtctagccaagaggccgaggaagtggaagaagaaggcgcccctgactacgagaacctgcaagagctgaacgggaattcctga

SEQ ID NO: 226 - DNA, 2658 bp, Artificial sequence
  Synthetic polynucleotide
atggttgccaccctgctcgtgacaagcctgctgctgtgcgagctgccccaccctgcctttctgctgatccccgataccgaggtgcagctggtggaatctggcggcggactggtgcagcctggcggatctctgagactgagctgtgccgccagcggcttcaccttcagcagcttcggaatgcactgggtgcgccaggcccctggcaaaggactggaatgggtggcctacatcagcagcgacagcagcgccatctactacgccgacaccgtgaagggccggttcaccatctcccgggacaacgccaagaacagcctgtacctgcagatgaactccctgcgggacgaggacaccgccgtgtactattgcggcagaggcagagagaacatctattacggcagcagactggactactggggccagggcacaaccgtgacagtgtctagcggaggcggaggatcaggcggcggaggaagtggcggagggggatctgatatccagctgacccagagccccagcttcctgagcgcctctgtgggcgacagagtgaccatcacatgcaaggccagccagaacgtggacaccaacgtggcctggtatcagcagaagcccggcaaggcccctaaggccctgatctacagcgccagctaccggtacagcggcgtgcccagcagattttctggcagcggctccggcaccgacttcaccctgacaatcagcagcctgcagcccgaggacttcgccacctactactgccagcagtacaacaactaccctttcaccttcggccaggggaccaagctggaaatcaaagcggccgcaaccacgacgccagcgccgcgaccaccaacaccggcgcccaccatcgcgtcgcagcccctgtccctgcgcccagaggcgtgccggccagcggcggggggcgcagtgcacacgagggggctggacttcgcctgtgatatctacatctgggcgcccttggccgggacttgtggggtccttctcctgtcactggttatcaccctttactgcaaaggatccggcggtggtggatctgctctgagaaacgtgcccttcagatccgaggttctcggctgggaccctgatagcctggccgactacttcaagaagctgaactacaaggactgcgagaaggccgtgaagaagtaccatatcgacggcgccagattcctgaacctgaccgagaacgacatccagaagttccccaagctgagagtgcccatcctgagcaagctgagccaagagatcaacaagaacgaggaacggcggagcatcttcaccagaaagccccaggtgccaagattccccgaggaaacagagagccacgaggaagataacggcggctggtccagcttcgaagaggacgactacgagagccccaacgacgatcaggatggcgaggatgatggcgattacgagtcccctaacgaagaggaagaggcccctgttgaggacgacgccgattatgagcctcctcctagcaacgacgaagaagccctgcagaacagcatcctgcctgccaagccttttccaaacagcaacagcatgtacatcgaccggcctccaagcggcaaaacacctcagcaacctccagttcctcctcagcgacctatggctgcattgcctcctccaccagccggaagaaatcactctccactgcctccacctcagaccaatcacgaggaacccagcagaagcagaaaccacaagaccgccaagctgcccgctccatccatcgatagaagcaccaagcctccactggacagatctctggcccctttcgatagagagcccttcacactgggcaagaagcctccattcagcgacaagcctagcatccctgctggaagaagcctgggcgagcatctgcctaagatccagaaacctcctctgccacctaccaccgagagacacgagagatctagccctctgcctggcaagaaaccacctgtgcctaaacacggctggggcccagacagaagggaaaacgacgaggacgatgtgcaccagaggccattgcctcaacctgctctgctgcccatgtccagcaacacattccccagcaggtccaccaaaccttctccaatgaatcccctgcctagcagccacatgcctggcgcctttagcgagagcaatagcagctttcctcagagcgccagcctgcctccttactttagccagggacctagcaaccggccacctatcagagccgagggcagaaattttcccctgccactgcctaacaagcccagacctccatctcctgccgaggaagagaacagcctgaacgaagagtggtacgtgtcctacatcaccagacctgaagccgaggctgccctgagaaagatcaaccaggatggcacctttctcgtgcgggacagcagcaaaaagaccaccaccaatccttacgtgctgatggtgctgtacaaggacaaggtgtacaacatccagatccgctaccagaaagaaagccaggtgtacctgctcggcaccggcctgagaggcaaagaggattttctgagcgtcagcgacatcatcgactactttagaaagatgcccctgctgctgatcgacggcaagaacagaggcagcagataccagtgcacactgacacacgctgccggctatcccgggaattcctga

SEQ ID NO: 227 - DNA, 1728 bp, Artificial sequence
  Synthetic polynucleotide
atgctgctgctcgtgacatctctgctgctgtgcgagctgccccaccccgcctttctgctgatccccgatatcctgctgacccagacccctctgagcctgcctgtgtctctgggcgatcaggccagcatcagctgcagatccagccagagcctggtgcaccggaacggcaacacctacctgcactggtatctgcagaagcccggccagagccccaagctgctgattcacaaggtgtccaaccggttcagcggcgtgcccgacagattttctggcagcggctccggcaccgacttcaccctgaagatcagccgggtggaagccgaggacctgggcgtgtacttctgcagccagtccacccacgtgccccccctgacatttggcgccggaacaaagctggaactgaagggcagcacaagcggcagcggcaagcctggatctggcgagggaagcaccaagggcgaagtgaagctgcagcagagcggcccctctctggtggaacctggcgcctctgtgatgatctcctgcaaggccagcggcagctccttcaccggctacaacatgaactgggtgcgccagaacatcggcaagagcctggaatggatcggcgccatcgacccctactacggcggcaccagctacaaccagaagttcaagggcagagccaccctgaccgtggacaagagcagctccaccgcctacatgcacctgaagtccctgaccagcgaggacagcgccgtgtactactgcgtgtccggcatggaatactggggccagggcacaagcgtgaccgtgtcctctgcggccgcaatcgaagtgatgtaccctccaccttacctggacaacgagaagtccaacggcaccatcatccacgtgaagggcaagcacctgtgtccttctccactgttccctggacctagcaagcctttctgggtgctcgtggttgttggcggcgtgctggcctgttattctctgctggtcaccgtggccttcatcatcttttgggtcggatcccactgtcacagactgcctggcagctacgatagcaccagcagcgacagcctgtatcctcggggcatccagttcaagaggcctcatacagttgccccttggcctcctgcctatcctcctgtgacaagctaccctccactgagccaacctgacctgctgcctattcctagatctcctcagcctctcggcggcagccacagaacacctagcagcagaagagatagcgacggcgccaatagcgtggcctcttatgagaatgagggcgcctctggcattagaggcgctcaagctggatggggagtttggggccctagctggacaagactgacacctgtgtctctgcctccagagcctgcctgtgaagatgccgacgaggacgaggatgactatcacaaccctggctacctggtggtgctgcctgatagcacaccagccacatctacagccgctccatctgctccagctctgagcacacctggcatcagagacagcgccttcagcatggaatccatcgacgactacgtgaacgtgccagagtctggcgaatctgccgaagcctctctggacggctcccgggaatatgtgaatgtgtcccaagaactgcaccctggcgccgctaaaacagaacctgctgctctgtctagccaagaggccgaggaagtggaagaagaaggcgcccctgactacgagaacctgcaagagctgaacgggaattcctga

SEQ ID NO: 228 - DNA, 2646 bp, Artificial sequence
  Synthetic polynucleotide
atgctgctgctcgtgacatctctgctgctgtgcgagctgccccaccccgcctttctgctgatccccgatatcctgctgacccagacccctctgagcctgcctgtgtctctgggcgatcaggccagcatcagctgcagatccagccagagcctggtgcaccggaacggcaacacctacctgcactggtatctgcagaagcccggccagagccccaagctgctgattcacaaggtgtccaaccggttcagcggcgtgcccgacagattttctggcagcggctccggcaccgacttcaccctgaagatcagccgggtggaagccgaggacctgggcgtgtacttctgcagccagtccacccacgtgccccccctgacatttggcgccggaacaaagctggaactgaagggcagcacaagcggcagcggcaagcctggatctggcgagggaagcaccaagggcgaagtgaagctgcagcagagcggcccctctctggtggaacctggcgcctctgtgatgatctcctgcaaggccagcggcagctccttcaccggctacaacatgaactgggtgcgccagaacatcggcaagagcctggaatggatcggcgccatcgacccctactacggcggcaccagctacaaccagaagttcaagggcagagccaccctgaccgtggacaagagcagctccaccgcctacatgcacctgaagtccctgaccagcgaggacagcgccgtgtactactgcgtgtccggcatggaatactggggccagggcacaagcgtgaccgtgtcctctgcggccgcaaccacgacgccagcgccgcgaccaccaacaccggcgcccaccatcgcgtcgcagcccctgtccctgcgcccagaggcgtgccggccagcggcggggggcgcagtgcacacgagggggctggacttcgcctgtgatatctacatctgggcgcccttggccgggacttgtggggtccttctcctgtcactggttatcaccctttactgcaaaggatccggcggtggtggatctgctctgagaaacgtgcccttcagatccgaggttctcggctgggaccctgatagcctggccgactacttcaagaagctgaactacaaggactgcgagaaggccgtgaagaagtaccatatcgacggcgccagattcctgaacctgaccgagaacgacatccagaagttccccaagctgagagtgcccatcctgagcaagctgagccaagagatcaacaagaacgaggaacggcggagcatcttcaccagaaagccccaggtgccaagattccccgaggaaacagagagccacgaggaagataacggcggctggtccagcttcgaagaggacgactacgagagccccaacgacgatcaggatggcgaggatgatggcgattacgagtcccctaacgaagaggaagaggcccctgttgaggacgacgccgattatgagcctcctcctagcaacgacgaagaagccctgcagaacagcatcctgcctgccaagccttttccaaacagcaacagcatgtacatcgaccggcctccaagcggcaaaacacctcagcaacctccagttcctcctcagcgacctatggctgcattgcctcctccaccagccggaagaaatcactctccactgcctccacctcagaccaatcacgaggaacccagcagaagcagaaaccacaagaccgccaagctgcccgctccatccatcgatagaagcaccaagcctccactggacagatctctggcccctttcgatagagagcccttcacactgggcaagaagcctccattcagcgacaagcctagcatccctgctggaagaagcctgggcgagcatctgcctaagatccagaaacctcctctgccacctaccaccgagagacacgagagatctagccctctgcctggcaagaaaccacctgtgcctaaacacggctggggcccagacagaagggaaaacgacgaggacgatgtgcaccagaggccattgcctcaacctgctctgctgcccatgtccagcaacacattccccagcaggtccaccaaaccttctccaatgaatcccctgcctagcagccacatgcctggcgcctttagcgagagcaatagcagctttcctcagagcgccagcctgcctccttactttagccagggacctagcaaccggccacctatcagagccgagggcagaaattttcccctgccactgcctaacaagcccagacctccatctcctgccgaggaagagaacagcctgaacgaagagtggtacgtgtcctacatcaccagacctgaagccgaggctgccctgagaaagatcaaccaggatggcacctttctcgtgcgggacagcagcaaaaagaccaccaccaatccttacgtgctgatggtgctgtacaaggacaaggtgtacaacatccagatccgctaccagaaagaaagccaggtgtacctgctcggcaccggcctgagaggcaaagaggattttctgagcgtcagcgacatcatcgactactttagaaagatgcccctgctgctgatcgacggcaagaacagaggcagcagataccagtgcacactgacacacgctgccggctatcccgggaattcctga

SEQ ID NO: 229 - DNA, 330 bp, Artificial sequence
  Synthetic polynucleotide
agccacagaacacctagcagcagaagagatagcgacggcgccaatagcgtggcctcttatgagaatgagggcgcctctggcattagaggcgctcaagctggatggggagtttggggccctagctggacaagactgacacctgtgtctctgcctccagagcctgcctgtgaagatgccgacgaggacgaggatgactatcacaaccctggctacctggtggtgctgcctgatagcacaccagccacatctacagccgctccatctgctccagctctgagcacacctggcatcagagacagcgccttcagcatggaatccatcgacgactag

SEQ ID NO: 230 - DNA, 1338 bp, Artificial sequence
  Synthetic polynucleotide
atgcttctcctggtgacaagccttctgctctgtgagttaccacacccagcattcctcctgatcccagacatccagatgacacagactacatcctccctgtctgcctctctgggagacagagtcaccatcagttgcagggcaagtcaggacattagtaaatatttaaattggtatcagcagaaaccagatggaactgttaaactcctgatctaccatacatcaagattacactcaggagtcccatcaaggttcagtggcagtgggtctggaacagattattctctcaccattagcaacctggagcaagaagatattgccacttacttttgccaacagggtaatacgcttccgtacacgttcggaggggggactaagttggaaataacaggctccacctctggatccggcaagcccggatctggcgagggatccaccaagggcgaggtgaaactgcaggagtcaggacctggcctggtggcgccctcacagagcctgtccgtcacatgcactgtctcaggggtctcattacccgactatggtgtaagctggattcgccagcctccacgaaagggtctggagtggctgggagtaatatggggtagtgaaaccacatactataattcagctctcaaatccagactgaccatcatcaaggacaactccaagagccaagttttcttaaaaatgaacagtctgcaaactgatgacacagccatttactactgtgccaaacattattactacggtggtagctatgctatggactactggggtcaaggaacctcagtcaccgtctcctcagcggccgcaatcgaagtgatgtaccctccaccttacctggacaacgagaagtccaacggcaccatcatccacgtgaagggcaagcacctgtgtccttctccactgttccctggacctagcaagcctttctgggtgctcgtggttgttggcggcgtgctggcctgttattctctgctggtcaccgtggccttcatcatcttttgggtcagccacagaacacctagcagcagaagagatagcgacggcgccaatagcgtggcctcttatgagaatgagggcgcctctggcattagaggcgctcaagctggatggggagtttggggccctagctggacaagactgacacctgtgtctctgcctccagagcctgcctgtgaagatgccgacgaggacgaggatgactatcacaaccctggctacctggtggtgctgcctgatagcacaccagccacatctacagccgctccatctgctccagctctgagcacacctggcatcagagacagcgccttcagcatggaatccatcgacgactag

SEQ ID NO: 231 - DNA, 1338 bp, Artificial sequence
  Synthetic polynucleotide
atgcttctcctggtgacaagccttctgctctgtgagttaccacacccagcattcctcctgatcccagacatccagatgacacagactacatcctccctgtctgcctctctgggagacagagtcaccatcagttgcagggcaagtcaggacattagtaaatatttaaattggtatcagcagaaaccagatggaactgttaaactcctgatctaccatacatcaagattacactcaggagtcccatcaaggttcagtggcagtgggtctggaacagattattctctcaccattagcaacctggagcaagaagatattgccacttacttttgccaacagggtaatacgcttccgtacacgttcggaggggggactaagttggaaataacaggctccacctctggatccggcaagcccggatctggcgagggatccaccaagggcgaggtgaaactgcaggagtcaggacctggcctggtggcgccctcacagagcctgtccgtcacatgcactgtctcaggggtctcattacccgactatggtgtaagctggattcgccagcctccacgaaagggtctggagtggctgggagtaatatggggtagtgaaaccacatactataattcagctctcaaatccagactgaccatcatcaaggacaactccaagagccaagttttcttaaaaatgaacagtctgcaaactgatgacacagccatttactactgtgccaaacattattactacggtggtagctatgctatggactactggggtcaaggaacctcagtcaccgtctcctcagcggccgcaatcgaagtgatgtaccctccaccttacctggacaacgagaagtccaacggcaccatcatccacgtgaagggcaagcacctggctccttctccactgttccctggacctagcaagcctttctgggtgctcgtggttgttggcggcgtgctggccgcttattctctgctggtcaccgtggccttcatcatcttttgggtcagccacagaacacctagcagcagaagagatagcgacggcgccaatagcgtggcctcttatgagaatgagggcgcctctggcattagaggcgctcaagctggatggggagtttggggccctagctggacaagactgacacctgtgtctctgcctccagagcctgcctgtgaagatgccgacgaggacgaggatgactatcacaaccctggctacctggtggtgctgcctgatagcacaccagccacatctacagccgctccatctgctccagctctgagcacacctggcatcagagacagcgccttcagcatggaatccatcgacgactag

SEQ ID NO: 232 - DNA, 210 bp, Artificial sequence
  Synthetic polynucleotide
agctggacaagactgacacctgtgtctctgcctccagagcctgcctgtgaagatgccgacgaggacgaggatgactatcacaaccctggctacctggtggtgctgcctgatagcacaccagccacatctacagccgctccatctgctccagctctgagcacacctggcatcagagacagcgccttcagcatggaatccatcgacgactag

SEQ ID NO: 233 - DNA, 1218 bp, Artificial sequence
  Synthetic polynucleotide
atgcttctcctggtgacaagccttctgctctgtgagttaccacacccagcattcctcctgatcccagacatccagatgacacagactacatcctccctgtctgcctctctgggagacagagtcaccatcagttgcagggcaagtcaggacattagtaaatatttaaattggtatcagcagaaaccagatggaactgttaaactcctgatctaccatacatcaagattacactcaggagtcccatcaaggttcagtggcagtgggtctggaacagattattctctcaccattagcaacctggagcaagaagatattgccacttacttttgccaacagggtaatacgcttccgtacacgttcggaggggggactaagttggaaataacaggctccacctctggatccggcaagcccggatctggcgagggatccaccaagggcgaggtgaaactgcaggagtcaggacctggcctggtggcgccctcacagagcctgtccgtcacatgcactgtctcaggggtctcattacccgactatggtgtaagctggattcgccagcctccacgaaagggtctggagtggctgggagtaatatggggtagtgaaaccacatactataattcagctctcaaatccagactgaccatcatcaaggacaactccaagagccaagttttcttaaaaatgaacagtctgcaaactgatgacacagccatttactactgtgccaaacattattactacggtggtagctatgctatggactactggggtcaaggaacctcagtcaccgtctcctcagcggccgcaatcgaagtgatgtaccctccaccttacctggacaacgagaagtccaacggcaccatcatccacgtgaagggcaagcacctgtgtccttctccactgttccctggacctagcaagcctttctgggtgctcgtggttgttggcggcgtgctggcctgttattctctgctggtcaccgtggccttcatcatcttttgggtcagctggacaagactgacacctgtgtctctgcctccagagcctgcctgtgaagatgccgacgaggacgaggatgactatcacaaccctggctacctggtggtgctgcctgatagcacaccagccacatctacagccgctccatctgctccagctctgagcacacctggcatcagagacagcgccttcagcatggaatccatcgacgactag

SEQ ID NO: 234 - DNA, 1218 bp, Artificial sequence
  Synthetic polynucleotide
atgcttctcctggtgacaagccttctgctctgtgagttaccacacccagcattcctcctgatcccagacatccagatgacacagactacatcctccctgtctgcctctctgggagacagagtcaccatcagttgcagggcaagtcaggacattagtaaatatttaaattggtatcagcagaaaccagatggaactgttaaactcctgatctaccatacatcaagattacactcaggagtcccatcaaggttcagtggcagtgggtctggaacagattattctctcaccattagcaacctggagcaagaagatattgccacttacttttgccaacagggtaatacgcttccgtacacgttcggaggggggactaagttggaaataacaggctccacctctggatccggcaagcccggatctggcgagggatccaccaagggcgaggtgaaactgcaggagtcaggacctggcctggtggcgccctcacagagcctgtccgtcacatgcactgtctcaggggtctcattacccgactatggtgtaagctggattcgccagcctccacgaaagggtctggagtggctgggagtaatatggggtagtgaaaccacatactataattcagctctcaaatccagactgaccatcatcaaggacaactccaagagccaagttttcttaaaaatgaacagtctgcaaactgatgacacagccatttactactgtgccaaacattattactacggtggtagctatgctatggactactggggtcaaggaacctcagtcaccgtctcctcagcggccgcaatcgaagtgatgtaccctccaccttacctggacaacgagaagtccaacggcaccatcatccacgtgaagggcaagcacctggctccttctccactgttccctggacctagcaagcctttctgggtgctcgtggttgttggcggcgtgctggccgcttattctctgctggtcaccgtggccttcatcatcttttgggtcagctggacaagactgacacctgtgtctctgcctccagagcctgcctgtgaagatgccgacgaggacgaggatgactatcacaaccctggctacctggtggtgctgcctgatagcacaccagccacatctacagccgctccatctgctccagctctgagcacacctggcatcagagacagcgccttcagcatggaatccatcgacgactag

SEQ ID NO: 235 - DNA, 1311 bp, Artificial sequence
  Synthetic polynucleotide
ggatccttcaccagaaagccccaggtgccaagattccccgaggaaacagagagccacgaggaagataacggcggctggtccagcttcgaagaggacgactacgagagccccaacgacgatcaggatggcgaggatgatggcgattacgagtcccctaacgaagaggaagaggcccctgttgaggacgacgccgattatgagcctcctcctagcaacgacgaagaagccctgcagaacagcatcctgcctgccaagccttttccaaacagcaacagcatgtacatcgaccggcctccaagcggcaaaacacctcagcaacctccagttcctcctcagcgacctatggctgcattgcctcctccaccagccggaagaaatcactctccactgcctccacctcagaccaatcacgaggaacccagcagaagcagacgatcactggccccatttgatagagagcccttcacactgggcaagaagcctccattcagcgacaagcctagcatccctgctggaagaagcctgggcgagcatctgcctaagatccagaaacctcctctgccacctaccaccgagagacacgagagatctagccctctgcctggcaagaaaccacctgtgcctaaacacggctggggcccagacagaagggaaaacgacgaggacgatgtgcaccagaggccattgcctcaacctgctctgctgcccatgtccagcaacacattccccagcaggtccaccaaaccttctccaatgaatcccctgcctagcagccacatgcctggcgcctttagcgagagcaatagcagctttcctcagagcgccagcctgcctccttactttagccagggacctagcaaccggccacctatcagagccgagggcagaaattttcccctgccactgcctaacaagcccagacctccatctcctgccgaggaagagaacagcctgaacgaagagtggtacgtgtcctacatcaccagacctgaagccgaggctgccctgagaaagatcaaccaggatggcacctttctcgtgcgggacagcagcaaaaagaccaccaccaatccttacgtgctgatggtgctgtacaaggacaaggtgtacaacatccagatccgctaccagaaagaaagccaggtgtacctgctcggcaccggcctgagaggcaaagaggattttctgagcgtcagcgacatcatcgactactttagaaagatgcccctgctgctgatcgacggcaagaacagaggcagcagataccagtgcacactgacacacgctgccggctatcccgggaattcctga

SEQ ID NO: 236 - DNA, 2322 bp, Artificial sequence
  Synthetic polynucleotide
atggctcgctcggtgaccctggtctttctggtgcttgtctcactgaccggtttgtatgctgctgatatccagatgacccagtccccgagctccctgtccgcctctgtgggcgatagggtcaccatcacctgccgtgccagtcaggatgtgaatactgctgtagcctggtatcaacagaaaccaggaaaagctccgaaactactgatttactcggcatccttccttgagtctggagtcccttctcgcttctctggatctagatctgggacggatttcactctgaccatcagcagtctgcagccggaagacttcgcaacttattactgtcagcaacattatactactcctcccacgttcggacagggtaccaaggtggagatcaaagggtctacatctggatctgggaagccgggttctggtgagggttctggtgaggttcagctggtggagtctggcggtggcctggtgcagccagggggctcactccgtttgtcctgtgcagcttctggcttcaacattaaagacacctatatacactgggtgcgtcaggccccgggtaagggcctggaatgggttgcaaggatttatcctacgaatggttatactagatatgccgatagcgtcaagggccgtttcactataagcgcagacacatccaaaaacacagcctacctgcagatgaacagcctgcgtgctgaggacactgccgtctattattgttctagatggggaggggacggcttctatgctatggacgtgtggggtcaaggaaccctggtcaccgtctcctcggcggccgcaaccacgacgccagcgccgcgaccaccaacaccggcgcccaccatcgcgtcgcagcccctgtccctgcgcccagaggcgtgccggccagcggcggggggcgcagtgcacacgagggggctggacttcgcctgtgatatctacatctgggcgcccttggccgggacttgtggggtccttctcctgtcactggttatcaccctttactgcaaaggatccttcaccagaaagccccaggtgccaagattccccgaggaaacagagagccacgaggaagataacggcggctggtccagcttcgaagaggacgactacgagagccccaacgacgatcaggatggcgaggatgatggcgattacgagtcccctaacgaagaggaagaggcccctgttgaggacgacgccgattatgagcctcctcctagcaacgacgaagaagccctgcagaacagcatcctgcctgccaagccttttccaaacagcaacagcatgtacatcgaccggcctccaagcggcaaaacacctcagcaacctccagttcctcctcagcgacctatggctgcattgcctcctccaccagccggaagaaatcactctccactgcctccacctcagaccaatcacgaggaacccagcagaagcagacgatcactggccccatttgatagagagcccttcacactgggcaagaagcctccattcagcgacaagcctagcatccctgctggaagaagcctgggcgagcatctgcctaagatccagaaacctcctctgccacctaccaccgagagacacgagagatctagccctctgcctggcaagaaaccacctgtgcctaaacacggctggggcccagacagaagggaaaacgacgaggacgatgtgcaccagaggccattgcctcaacctgctctgctgcccatgtccagcaacacattccccagcaggtccaccaaaccttctccaatgaatcccctgcctagcagccacatgcctggcgcctttagcgagagcaatagcagctttcctcagagcgccagcctgcctccttactttagccagggacctagcaaccggccacctatcagagccgagggcagaaattttcccctgccactgcctaacaagcccagacctccatctcctgccgaggaagagaacagcctgaacgaagagtggtacgtgtcctacatcaccagacctgaagccgaggctgccctgagaaagatcaaccaggatggcacctttctcgtgcgggacagcagcaaaaagaccaccaccaatccttacgtgctgatggtgctgtacaaggacaaggtgtacaacatccagatccgctaccagaaagaaagccaggtgtacctgctcggcaccggcctgagaggcaaagaggattttctgagcgtcagcgacatcatcgactactttagaaagatgcccctgctgctgatcgacggcaagaacagaggcagcagataccagtgcacactgacacacgctgccggctatcccgggaattcctga

SEQ ID NO: 237 - DNA, 1503 bp, Artificial sequence
  Synthetic polynucleotide
ggatccggcggtggtggatctgctctgagaaacgtgcccttcagatccgaggttctcggctgggaccctgatagcctggccgactacttcaagaagctgaactacaaggactgcgagaaggccgtgaagaagtaccatatcgacggcgccagattcctgaacctgaccgagaacgacatccagaagttccccaagctgagagtgcccatcctgagcaagctgagccaagagatcaacaagaacgaggaacggcggagcatcttcaccagaaagccccaggtgccaagattccccgaggaaacagagagccacgaggaagataacggcggctggtccagcttcgaagaggacgactacgagagccccaacgacgatcaggatggcgaggatgatggcgattacgagtcccctaacgaagaggaagaggcccctgttgaggacgacgccgattatgagcctcctcctagcaacgacgaagaagccctgcagaacagcatcctgcctgccaagccttttccaaacagcaacagcatgtacatcgaccggcctccaagcggcaaaacacctcagcaacctccagttcctcctcagcgacctatggctgcattgcctcctccaccagccggaagaaatcactctccactgcctccacctcagaccaatcacgaggaacccagcagaagcagaaagcctagcatccctgctggaagaagcctgggcgagcatctgcctaagatccagaaacctcctctgccacctaccaccgagagacacgagagatctagccctctgcctggcaagaaaccacctgtgcctaaacacggctggggcccagacagaagggaaaacgacgaggacgatgtgcaccagaggccattgcctcaacctgctctgctgcccatgtccagcaacacattccccagcaggtccaccaaaccttctccaatgaatcccctgcctagcagccacatgcctggcgcctttagcgagagcaatagcagctttcctcagagcgccagcctgcctccttactttagccagggacctagcaaccggccacctatcagagccgagggcagaaattttcccctgccactgcctaacaagcccagacctccatctcctgccgaggaagagaacagcctgaacgaagagtggtacgtgtcctacatcaccagacctgaagccgaggctgccctgagaaagatcaaccaggatggcacctttctcgtgcgggacagcagcaaaaagaccaccaccaatccttacgtgctgatggtgctgtacaaggacaaggtgtacaacatccagatccgctaccagaaagaaagccaggtgtacctgctcggcaccggcctgagaggcaaagaggattttctgagcgtcagcgacatcatcgactactttagaaagatgcccctgctgctgatcgacggcaagaacagaggcagcagataccagtgcacactgacacacgctgccggctatcccgggaattcctga

SEQ ID NO: 238 - DNA, 2514 bp, Artificial sequence
  Synthetic polynucleotide
atggctcgctcggtgaccctggtctttctggtgcttgtctcactgaccggtttgtatgctgctgatatccagatgacccagtccccgagctccctgtccgcctctgtgggcgatagggtcaccatcacctgccgtgccagtcaggatgtgaatactgctgtagcctggtatcaacagaaaccaggaaaagctccgaaactactgatttactcggcatccttccttgagtctggagtcccttctcgcttctctggatctagatctgggacggatttcactctgaccatcagcagtctgcagccggaagacttcgcaacttattactgtcagcaacattatactactcctcccacgttcggacagggtaccaaggtggagatcaaagggtctacatctggatctgggaagccgggttctggtgagggttctggtgaggttcagctggtggagtctggcggtggcctggtgcagccagggggctcactccgtttgtcctgtgcagcttctggcttcaacattaaagacacctatatacactgggtgcgtcaggccccgggtaagggcctggaatgggttgcaaggatttatcctacgaatggttatactagatatgccgatagcgtcaagggccgtttcactataagcgcagacacatccaaaaacacagcctacctgcagatgaacagcctgcgtgctgaggacactgccgtctattattgttctagatggggaggggacggcttctatgctatggacgtgtggggtcaaggaaccctggtcaccgtctcctcggcggccgcaaccacgacgccagcgccgcgaccaccaacaccggcgcccaccatcgcgtcgcagcccctgtccctgcgcccagaggcgtgccggccagcggcggggggcgcagtgcacacgagggggctggacttcgcctgtgatatctacatctgggcgcccttggccgggacttgtggggtccttctcctgtcactggttatcaccctttactgcaaaggatccggcggtggtggatctgctctgagaaacgtgcccttcagatccgaggttctcggctgggaccctgatagcctggccgactacttcaagaagctgaactacaaggactgcgagaaggccgtgaagaagtaccatatcgacggcgccagattcctgaacctgaccgagaacgacatccagaagttccccaagctgagagtgcccatcctgagcaagctgagccaagagatcaacaagaacgaggaacggcggagcatcttcaccagaaagccccaggtgccaagattccccgaggaaacagagagccacgaggaagataacggcggctggtccagcttcgaagaggacgactacgagagccccaacgacgatcaggatggcgaggatgatggcgattacgagtcccctaacgaagaggaagaggcccctgttgaggacgacgccgattatgagcctcctcctagcaacgacgaagaagccctgcagaacagcatcctgcctgccaagccttttccaaacagcaacagcatgtacatcgaccggcctccaagcggcaaaacacctcagcaacctccagttcctcctcagcgacctatggctgcattgcctcctccaccagccggaagaaatcactctccactgcctccacctcagaccaatcacgaggaacccagcagaagcagaaagcctagcatccctgctggaagaagcctgggcgagcatctgcctaagatccagaaacctcctctgccacctaccaccgagagacacgagagatctagccctctgcctggcaagaaaccacctgtgcctaaacacggctggggcccagacagaagggaaaacgacgaggacgatgtgcaccagaggccattgcctcaacctgctctgctgcccatgtccagcaacacattccccagcaggtccaccaaaccttctccaatgaatcccctgcctagcagccacatgcctggcgcctttagcgagagcaatagcagctttcctcagagcgccagcctgcctccttactttagccagggacctagcaaccggccacctatcagagccgagggcagaaattttcccctgccactgcctaacaagcccagacctccatctcctgccgaggaagagaacagcctgaacgaagagtggtacgtgtcctacatcaccagacctgaagccgaggctgccctgagaaagatcaaccaggatggcacctttctcgtgcgggacagcagcaaaaagaccaccaccaatccttacgtgctgatggtgctgtacaaggacaaggtgtacaacatccagatccgctaccagaaagaaagccaggtgtacctgctcggcaccggcctgagaggcaaagaggattttctgagcgtcagcgacatcatcgactactttagaaagatgcccctgctgctgatcgacggcaagaacagaggcagcagataccagtgcacactgacacacgctgccggctatcccgggaattcctga

SEQ ID NO: 239 - DNA, 1398 bp, Artificial sequence
  Synthetic polynucleotide
ggatccggcggtggtggatctgctctgagaaacgtgcccttcagatccgaggttctcggctgggaccctgatagcctggccgactacttcaagaagctgaactacaaggactgcgagaaggccgtgaagaagtaccatatcgacggcgccagattcctgaacctgaccgagaacgacatccagaagttccccaagctgagagtgcccatcctgagcaagctgagccaagagatcaacaagaacgaggaacggcggagcatcttcaccagaaagccccaggtgccaagattccccgaggaaacagagagccacgaggaagataacggcggctggtccagcttcgaagaggacgactacgagagccccaacgacgatcaggatggcgaggatgatggcgattacgagtcccctaacgaagaggaagaggcccctgttgaggacgacgccgattatgagcctcctcctagcaacgacgaagaagccctgcagaacagcatcctgcctgccaagccttttccaaacagcaacagcatgtacatcgaccggcctccaagcggcaaaacacctcagcaacctccagttcctcctcagcgacctatggctgcattgcctcctccaccagccggaagaaatcactctccactgcctccacctcagaccaatcacgaggaacccagcagaagcagacctggcaagaaaccacctgtgcctaaacacggctggggcccagacagaagggaaaacgacgaggacgatgtgcaccagaggccattgcctcaacctgctctgctgcccatgtccagcaacacattccccagcaggtccaccaaaccttctccaatgaatcccctgcctagcagccacatgcctggcgcctttagcgagagcaatagcagctttcctcagagcgccagcctgcctccttactttagccagggacctagcaaccggccacctatcagagccgagggcagaaattttcccctgccactgcctaacaagcccagacctccatctcctgccgaggaagagaacagcctgaacgaagagtggtacgtgtcctacatcaccagacctgaagccgaggctgccctgagaaagatcaaccaggatggcacctttctcgtgcgggacagcagcaaaaagaccaccaccaatccttacgtgctgatggtgctgtacaaggacaaggtgtacaacatccagatccgctaccagaaagaaagccaggtgtacctgctcggcaccggcctgagaggcaaagaggattttctgagcgtcagcgacatcatcgactactttagaaagatgcccctgctgctgatcgacggcaagaacagaggcagcagataccagtgcacactgacacacgctgccggctatcccgggaattcctga

SEQ ID NO: 240 - DNA, 2409 bp, Artificial sequence
  Synthetic polynucleotide
atggctcgctcggtgaccctggtctttctggtgcttgtctcactgaccggtttgtatgctgctgatatccagatgacccagtccccgagctccctgtccgcctctgtgggcgatagggtcaccatcacctgccgtgccagtcaggatgtgaatactgctgtagcctggtatcaacagaaaccaggaaaagctccgaaactactgatttactcggcatccttccttgagtctggagtcccttctcgcttctctggatctagatctgggacggatttcactctgaccatcagcagtctgcagccggaagacttcgcaacttattactgtcagcaacattatactactcctcccacgttcggacagggtaccaaggtggagatcaaagggtctacatctggatctgggaagccgggttctggtgagggttctggtgaggttcagctggtggagtctggcggtggcctggtgcagccagggggctcactccgtttgtcctgtgcagcttctggcttcaacattaaagacacctatatacactgggtgcgtcaggccccgggtaagggcctggaatgggttgcaaggatttatcctacgaatggttatactagatatgccgatagcgtcaagggccgtttcactataagcgcagacacatccaaaaacacagcctacctgcagatgaacagcctgcgtgctgaggacactgccgtctattattgttctagatggggaggggacggcttctatgctatggacgtgtggggtcaaggaaccctggtcaccgtctcctcggcggccgcaaccacgacgccagcgccgcgaccaccaacaccggcgcccaccatcgcgtcgcagcccctgtccctgcgcccagaggcgtgccggccagcggcggggggcgcagtgcacacgagggggctggacttcgcctgtgatatctacatctgggcgcccttggccgggacttgtggggtccttctcctgtcactggttatcaccctttactgcaaaggatccggcggtggtggatctgctctgagaaacgtgcccttcagatccgaggttctcggctgggaccctgatagcctggccgactacttcaagaagctgaactacaaggactgcgagaaggccgtgaagaagtaccatatcgacggcgccagattcctgaacctgaccgagaacgacatccagaagttccccaagctgagagtgcccatcctgagcaagctgagccaagagatcaacaagaacgaggaacggcggagcatcttcaccagaaagccccaggtgccaagattccccgaggaaacagagagccacgaggaagataacggcggctggtccagcttcgaagaggacgactacgagagccccaacgacgatcaggatggcgaggatgatggcgattacgagtcccctaacgaagaggaagaggcccctgttgaggacgacgccgattatgagcctcctcctagcaacgacgaagaagccctgcagaacagcatcctgcctgccaagccttttccaaacagcaacagcatgtacatcgaccggcctccaagcggcaaaacacctcagcaacctccagttcctcctcagcgacctatggctgcattgcctcctccaccagccggaagaaatcactctccactgcctccacctcagaccaatcacgaggaacccagcagaagcagacctggcaagaaaccacctgtgcctaaacacggctggggcccagacagaagggaaaacgacgaggacgatgtgcaccagaggccattgcctcaacctgctctgctgcccatgtccagcaacacattccccagcaggtccaccaaaccttctccaatgaatcccctgcctagcagccacatgcctggcgcctttagcgagagcaatagcagctttcctcagagcgccagcctgcctccttactttagccagggacctagcaaccggccacctatcagagccgagggcagaaattttcccctgccactgcctaacaagcccagacctccatctcctgccgaggaagagaacagcctgaacgaagagtggtacgtgtcctacatcaccagacctgaagccgaggctgccctgagaaagatcaaccaggatggcacctttctcgtgcgggacagcagcaaaaagaccaccaccaatccttacgtgctgatggtgctgtacaaggacaaggtgtacaacatccagatccgctaccagaaagaaagccaggtgtacctgctcggcaccggcctgagaggcaaagaggattttctgagcgtcagcgacatcatcgactactttagaaagatgcccctgctgctgatcgacggcaagaacagaggcagcagataccagtgcacactgacacacgctgccggctatcccgggaattcctga

SEQ ID NO: 241 - DNA, 816 bp, Artificial sequence
  Synthetic polynucleotide
atggctcgctcggtgaccctggtctttctggtgcttgtctcactgaccggtttgtatgctgcttacactgatatcgaaatgaaccgcctgggtaaggatacccaggttcaactcgtcgaatcaggaggagggtggcaaccggggagaagtcttagactgtcctgtgcagcaagtgggttcattttctctgaacataacatggcttgggtgagacaagccccaggaaaagggctcgaatgggtggcgactatttctgacgacgggagaaacacgtattatagggactccatgcgcggccggtttacaatcagtcgagataattccaaaaacacgctctaccttcaaatgaatagtctgagagctgaggacaccgctgtctactattgtacgtcacacaggtataatttgtttgattcatgggggcaagggacgatggttacagtgtcttctggaggtggaggaagtggaggcggaggcagtggtggcggtggatctgatatacaaatgactcagtcaccatcatcactcagcgcaagtgtgggtgatcgggtgactataacgtgcaaagcatcacaaaacattgaccggtatctcaactggtaccagcagaaacctgggaaagctccaaagcgactcatttacaatacaaataaacttcaaacgggggtaccttcaagattcagcggaagcgggagtgggaccgaatttactttgactatcagctcattgcagccagaggacttcgcgacgtattattgtctgcaatataactcactgcctctgacttttggacaaggcactaagctggagataaag

SEQ ID NO: 242 - DNA, 1746 bp, Artificial sequence
  Synthetic polynucleotide
atggctcgctcggtgaccctggtctttctggtgcttgtctcactgaccggtttgtatgctgcttacactgatatcgaaatgaaccgcctgggtaaggatacccaggttcaactcgtcgaatcaggaggagggtggcaaccggggagaagtcttagactgtcctgtgcagcaagtgggttcattttctctgaacataacatggcttgggtgagacaagccccaggaaaagggctcgaatgggtggcgactatttctgacgacgggagaaacacgtattatagggactccatgcgcggccggtttacaatcagtcgagataattccaaaaacacgctctaccttcaaatgaatagtctgagagctgaggacaccgctgtctactattgtacgtcacacaggtataatttgtttgattcatgggggcaagggacgatggttacagtgtcttctggaggtggaggaagtggaggcggaggcagtggtggcggtggatctgatatacaaatgactcagtcaccatcatcactcagcgcaagtgtgggtgatcgggtgactataacgtgcaaagcatcacaaaacattgaccggtatctcaactggtaccagcagaaacctgggaaagctccaaagcgactcatttacaatacaaataaacttcaaacgggggtaccttcaagattcagcggaagcgggagtgggaccgaatttactttgactatcagctcattgcagccagaggacttcgcgacgtattattgtctgcaatataactcactgcctctgacttttggacaaggcactaagctggagataaaggcggccgcaatcgaagtgatgtaccctccaccttacctggacaacgagaagtccaacggcaccatcatccacgtgaagggcaagcacctgtgtccttctccactgttccctggacctagcaagcctttctgggtgctcgtggttgttggcggcgtgctggcctgttattctctgctggtcaccgtggccttcatcatcttttgggtcggatcccactgtcacagactgcctggcagctacgatagcaccagcagcgacagcctgtatcctcggggcatccagttcaagaggcctcatacagttgccccttggcctcctgcctatcctcctgtgacaagctaccctccactgagccaacctgacctgctgcctattcctagatctcctcagcctctcggcggcagccacagaacacctagcagcagaagagatagcgacggcgccaatagcgtggcctcttatgagaatgagggcgcctctggcattagaggcgctcaagctggatggggagtttggggccctagctggacaagactgacacctgtgtctctgcctccagagcctgcctgtgaagatgccgacgaggacgaggatgactatcacaaccctggctacctggtggtgctgcctgatagcacaccagccacatctacagccgctccatctgctccagctctgagcacacctggcatcagagacagcgccttcagcatggaatccatcgacgactacgtgaacgtgccagagtctggcgaatctgccgaagcctctctggacggctcccgggaatatgtgaatgtgtcccaagaactgcaccctggcgccgctaaaacagaacctgctgctctgtctagccaagaggccgaggaagtggaagaagaaggcgcccctgactacgagaacctgcaagagctgaacgggaattcctga

SEQ ID NO: 243 - DNA, 1746 bp, Artificial sequence
  Synthetic polynucleotide
atggctcgctcggtgaccctggtctttctggtgcttgtctcactgaccggtttgtatgctgcttacactgatatcgaaatgaaccgcctgggtaaggatacccaggttcaactcgtcgaatcaggaggagggtggcaaccggggagaagtcttagactgtcctgtgcagcaagtgggttcattttctctgaacataacatggcttgggtgagacaagccccaggaaaagggctcgaatgggtggcgactatttctgacgacgggagaaacacgtattatagggactccatgcgcggccggtttacaatcagtcgagataattccaaaaacacgctctaccttcaaatgaatagtctgagagctgaggacaccgctgtctactattgtacgtcacacaggtataatttgtttgattcatgggggcaagggacgatggttacagtgtcttctggaggtggaggaagtggaggcggaggcagtggtggcggtggatctgatatacaaatgactcagtcaccatcatcactcagcgcaagtgtgggtgatcgggtgactataacgtgcaaagcatcacaaaacattgaccggtatctcaactggtaccagcagaaacctgggaaagctccaaagcgactcatttacaatacaaataaacttcaaacgggggtaccttcaagattcagcggaagcgggagtgggaccgaatttactttgactatcagctcattgcagccagaggacttcgcgacgtattattgtctgcaatataactcactgcctctgacttttggacaaggcactaagctggagataaaggcggccgcaatcgaagtgatgtaccctccaccttacctggacaacgagaagtccaacggcaccatcatccacgtgaagggcaagcacctggctccttctccactgttccctggacctagcaagcctttctgggtgctcgtggttgttggcggcgtgctggccgcttattctctgctggtcaccgtggccttcatcatcttttgggtcggatcccactgtcacagactgcctggcagctacgatagcaccagcagcgacagcctgtatcctcggggcatccagttcaagaggcctcatacagttgccccttggcctcctgcctatcctcctgtgacaagctaccctccactgagccaacctgacctgctgcctattcctagatctcctcagcctctcggcggcagccacagaacacctagcagcagaagagatagcgacggcgccaatagcgtggcctcttatgagaatgagggcgcctctggcattagaggcgctcaagctggatggggagtttggggccctagctggacaagactgacacctgtgtctctgcctccagagcctgcctgtgaagatgccgacgaggacgaggatgactatcacaaccctggctacctggtggtgctgcctgatagcacaccagccacatctacagccgctccatctgctccagctctgagcacacctggcatcagagacagcgccttcagcatggaatccatcgacgactacgtgaacgtgccagagtctggcgaatctgccgaagcctctctggacggctcccgggaatatgtgaatgtgtcccaagaactgcaccctggcgccgctaaaacagaacctgctgctctgtctagccaagaggccgaggaagtggaagaagaaggcgcccctgactacgagaacctgcaagagctgaacgggaattcctga

SEQ ID NO: 244 - DNA, 1548 bp, Artificial sequence
  Synthetic polynucleotide
atggctcgctcggtgaccctggtctttctggtgcttgtctcactgaccggtttgtatgctgcttacactgatatcgaaatgaaccgcctgggtaaggatacccaggttcaactcgtcgaatcaggaggagggtggcaaccggggagaagtcttagactgtcctgtgcagcaagtgggttcattttctctgaacataacatggcttgggtgagacaagccccaggaaaagggctcgaatgggtggcgactatttctgacgacgggagaaacacgtattatagggactccatgcgcggccggtttacaatcagtcgagataattccaaaaacacgctctaccttcaaatgaatagtctgagagctgaggacaccgctgtctactattgtacgtcacacaggtataatttgtttgattcatgggggcaagggacgatggttacagtgtcttctggaggtggaggaagtggaggcggaggcagtggtggcggtggatctgatatacaaatgactcagtcaccatcatcactcagcgcaagtgtgggtgatcgggtgactataacgtgcaaagcatcacaaaacattgaccggtatctcaactggtaccagcagaaacctgggaaagctccaaagcgactcatttacaatacaaataaacttcaaacgggggtaccttcaagattcagcggaagcgggagtgggaccgaatttactttgactatcagctcattgcagccagaggacttcgcgacgtattattgtctgcaatataactcactgcctctgacttttggacaaggcactaagctggagataaaggcggccgcaatcgaagtgatgtaccctccaccttacctggacaacgagaagtccaacggcaccatcatccacgtgaagggcaagcacctgtgtccttctccactgttccctggacctagcaagcctttctgggtgctcgtggttgttggcggcgtgctggcctgttattctctgctggtcaccgtggccttcatcatcttttgggtcggatcccactgtcacagactgcctggcagctacgatagcaccagcagcgacagcctgtatcctcggggcatccagttcaagaggcctcatacagttgccccttggcctcctgcctatcctcctgtgacaagctaccctccactgagccaacctgacctgctgcctattcctagatctcctcagcctctcggcggcagccacagaacacctagcagcagaagagatagcgacggcgccaatagcgtggcctcttatgagaatgagggcgcctctggcattagaggcgctcaagctggatggggagtttggggccctagctggacaagactgacacctgtgtctctgcctccagagcctgcctgtgaagatgccgacgaggacgaggatgactatcacaaccctggctacctggtggtgctgcctgatagcacaccagccacatctacagccgctccatctgctccagctctgagcacacctggcatcagagacagcgccttcagcatggaatccatcgacgactag

SEQ ID NO: 245 - DNA, 1548 bp, Artificial sequence
  Synthetic polynucleotide
atggctcgctcggtgaccctggtctttctggtgcttgtctcactgaccggtttgtatgctgcttacactgatatcgaaatgaaccgcctgggtaaggatacccaggttcaactcgtcgaatcaggaggagggtggcaaccggggagaagtcttagactgtcctgtgcagcaagtgggttcattttctctgaacataacatggcttgggtgagacaagccccaggaaaagggctcgaatgggtggcgactatttctgacgacgggagaaacacgtattatagggactccatgcgcggccggtttacaatcagtcgagataattccaaaaacacgctctaccttcaaatgaatagtctgagagctgaggacaccgctgtctactattgtacgtcacacaggtataatttgtttgattcatgggggcaagggacgatggttacagtgtcttctggaggtggaggaagtggaggcggaggcagtggtggcggtggatctgatatacaaatgactcagtcaccatcatcactcagcgcaagtgtgggtgatcgggtgactataacgtgcaaagcatcacaaaacattgaccggtatctcaactggtaccagcagaaacctgggaaagctccaaagcgactcatttacaatacaaataaacttcaaacgggggtaccttcaagattcagcggaagcgggagtgggaccgaatttactttgactatcagctcattgcagccagaggacttcgcgacgtattattgtctgcaatataactcactgcctctgacttttggacaaggcactaagctggagataaaggcggccgcaatcgaagtgatgtaccctccaccttacctggacaacgagaagtccaacggcaccatcatccacgtgaagggcaagcacctggctccttctccactgttccctggacctagcaagcctttctgggtgctcgtggttgttggcggcgtgctggccgcttattctctgctggtcaccgtggccttcatcatcttttgggtcggatcccactgtcacagactgcctggcagctacgatagcaccagcagcgacagcctgtatcctcggggcatccagttcaagaggcctcatacagttgccccttggcctcctgcctatcctcctgtgacaagctaccctccactgagccaacctgacctgctgcctattcctagatctcctcagcctctcggcggcagccacagaacacctagcagcagaagagatagcgacggcgccaatagcgtggcctcttatgagaatgagggcgcctctggcattagaggcgctcaagctggatggggagtttggggccctagctggacaagactgacacctgtgtctctgcctccagagcctgcctgtgaagatgccgacgaggacgaggatgactatcacaaccctggctacctggtggtgctgcctgatagcacaccagccacatctacagccgctccatctgctccagctctgagcacacctggcatcagagacagcgccttcagcatggaatccatcgacgactag

SEQ ID NO: 246 - DNA, 2586 bp, Artificial sequence
  Synthetic polynucleotide
atgcttctcctggtgacaagccttctgctctgtgagttaccacacccagcattcctcctgatcccagacatccagatgacacagactacatcctccctgtctgcctctctgggagacagagtcaccatcagttgcagggcaagtcaggacattagtaaatatttaaattggtatcagcagaaaccagatggaactgttaaactcctgatctaccatacatcaagattacactcaggagtcccatcaaggttcagtggcagtgggtctggaacagattattctctcaccattagcaacctggagcaagaagatattgccacttacttttgccaacagggtaatacgcttccgtacacgttcggaggggggactaagttggaaataacaggctccacctctggatccggcaagcccggatctggcgagggatccaccaagggcgaggtgaaactgcaggagtcaggacctggcctggtggcgccctcacagagcctgtccgtcacatgcactgtctcaggggtctcattacccgactatggtgtaagctggattcgccagcctccacgaaagggtctggagtggctgggagtaatatggggtagtgaaaccacatactataattcagctctcaaatccagactgaccatcatcaaggacaactccaagagccaagttttcttaaaaatgaacagtctgcaaactgatgacacagccatttactactgtgccaaacattattactacggtggtagctatgctatggactactggggtcaaggaacctcagtcaccgtctcctcagcggccgcaaccacgacgccagcgccgcgaccaccaacaccggcgcccaccatcgcgtcgcagcccctgtccctgcgcccagaggcgtgccggccagcggcggggggcgcagtgcacacgagggggctggacttcgcctgtgatatctacatctgggcgcccttggccgggacttgtggggtccttctcctgtcactggttatcaccctttactgcaaaggatccggcggtggtggatctgctctgagaaacgtgcccttcagatccgaggttctcggctgggaccctgatagcctggccgactacttcaagaagctgaactacaaggactgcgagaaggccgtgaagaagtaccatatcgacggcgccagattcctgaacctgaccgagaacgacatccagaagttccccaagctgagagtgcccatcctgagcaagctgagccaagagatcaacaagaacgaggaacggcggagcatcttcaccagaaagccccaggtgccaagattccccgaggaaacagagagccacgaggaagataacggcggctggtccagcttcgaagaggacgactacgagagccccaacgacgatcaggatggcgaggatgatggcgattacgagtcccctaacgaagaggaagaggcccctgttgaggacgacgccgattatgagcctcctcctagcaacgacgaagaagccctgcagaacagcatcctgcctgccaagccttttccaaacagcaacagcatgtacatcgaccggcctccaagcggcaaaacacctcagcaacctccagttcctcctcagcgacctatggctgcattgcctcctccaccagccggaagaaatcactctccactgcctccacctcagaccaatcacgaggaacccagcagaagcagacgatcactggccccatttgatagagagcccttcacactgggcaagaagcctccattcagcgacaagcctagcatccctgctggaagaagcctgggcgagcatctgcctaagatccagaaacctcctctgccacctaccaccgagagacacgagagatctagccctctgcctggcaagaaaccacctgtgcctaaacacggctggggcccagacagaagggaaaacgacgaggacgatgtgcaccagaggccattgcctcaacctgctctgctgcccatgtccagcaacacattccccagcaggtccaccaaaccttctccaatgaatcccctgcctagcagccacatgcctggcgcctttagcgagagcaatagcagctttcctcagagcgccagcctgcctccttactttagccagggacctagcaaccggccacctatcagagccgagggcagaaattttcccctgccactgcctaacaagcccagacctccatctcctgccgaggaagagaacagcctgaacgaagagtggtacgtgtcctacatcaccagacctgaagccgaggctgccctgagaaagatcaaccaggatggcacctttctcgtgcgggacagcagcaaaaagaccaccaccaatccttacgtgctgatggtgctgtacaaggacaaggtgtacaacatccagatccgctaccagaaagaaagccaggtgtacctgctcggcaccggcctgagaggcaaagaggattttctgagcgtcagcgacatcatcgactactttagaaagatgcccctgctgctgatcgacggcaagaacagaggcagcagataccagtgcacactgacacacgctgccggctatcccgggaattcctga

SEQ ID NO: 247 - DNA, 2664 bp, Artificial sequence
  Synthetic polynucleotide
atggctcgctcggtgaccctggtctttctggtgcttgtctcactgaccggtttgtatgctgcttacactgatatcgaaatgaaccgcctgggtaaggatacccaggttcaactcgtcgaatcaggaggagggtggcaaccggggagaagtcttagactgtcctgtgcagcaagtgggttcattttctctgaacataacatggcttgggtgagacaagccccaggaaaagggctcgaatgggtggcgactatttctgacgacgggagaaacacgtattatagggactccatgcgcggccggtttacaatcagtcgagataattccaaaaacacgctctaccttcaaatgaatagtctgagagctgaggacaccgctgtctactattgtacgtcacacaggtataatttgtttgattcatgggggcaagggacgatggttacagtgtcttctggaggtggaggaagtggaggcggaggcagtggtggcggtggatctgatatacaaatgactcagtcaccatcatcactcagcgcaagtgtgggtgatcgggtgactataacgtgcaaagcatcacaaaacattgaccggtatctcaactggtaccagcagaaacctgggaaagctccaaagcgactcatttacaatacaaataaacttcaaacgggggtaccttcaagattcagcggaagcgggagtgggaccgaatttactttgactatcagctcattgcagccagaggacttcgcgacgtattattgtctgcaatataactcactgcctctgacttttggacaaggcactaagctggagataaaggcggccgcaaccacgacgccagcgccgcgaccaccaacaccggcgcccaccatcgcgtcgcagcccctgtccctgcgcccagaggcgtgccggccagcggcggggggcgcagtgcacacgagggggctggacttcgcctgtgatatctacatctgggcgcccttggccgggacttgtggggtccttctcctgtcactggttatcaccctttactgcaaaggatccggcggtggtggatctgctctgagaaacgtgcccttcagatccgaggttctcggctgggaccctgatagcctggccgactacttcaagaagctgaactacaaggactgcgagaaggccgtgaagaagtaccatatcgacggcgccagattcctgaacctgaccgagaacgacatccagaagttccccaagctgagagtgcccatcctgagcaagctgagccaagagatcaacaagaacgaggaacggcggagcatcttcaccagaaagccccaggtgccaagattccccgaggaaacagagagccacgaggaagataacggcggctggtccagcttcgaagaggacgactacgagagccccaacgacgatcaggatggcgaggatgatggcgattacgagtcccctaacgaagaggaagaggcccctgttgaggacgacgccgattatgagcctcctcctagcaacgacgaagaagccctgcagaacagcatcctgcctgccaagccttttccaaacagcaacagcatgtacatcgaccggcctccaagcggcaaaacacctcagcaacctccagttcctcctcagcgacctatggctgcattgcctcctccaccagccggaagaaatcactctccactgcctccacctcagaccaatcacgaggaacccagcagaagcagaaaccacaagaccgccaagctgcccgctccatccatcgatagaagcaccaagcctccactggacagatctctggcccctttcgatagagagcccttcacactgggcaagaagcctccattcagcgacaagcctagcatccctgctggaagaagcctgggcgagcatctgcctaagatccagaaacctcctctgccacctaccaccgagagacacgagagatctagccctctgcctggcaagaaaccacctgtgcctaaacacggctggggcccagacagaagggaaaacgacgaggacgatgtgcaccagaggccattgcctcaacctgctctgctgcccatgtccagcaacacattccccagcaggtccaccaaaccttctccaatgaatcccctgcctagcagccacatgcctggcgcctttagcgagagcaatagcagctttcctcagagcgccagcctgcctccttactttagccagggacctagcaaccggccacctatcagagccgagggcagaaattttcccctgccactgcctaacaagcccagacctccatctcctgccgaggaagagaacagcctgaacgaagagtggtacgtgtcctacatcaccagacctgaagccgaggctgccctgagaaagatcaaccaggatggcacctttctcgtgcgggacagcagcaaaaagaccaccaccaatccttacgtgctgatggtgctgtacaaggacaaggtgtacaacatccagatccgctaccagaaagaaagccaggtgtacctgctcggcaccggcctgagaggcaaagaggattttctgagcgtcagcgacatcatcgactactttagaaagatgcccctgctgctgatcgacggcaagaacagaggcagcagataccagtgcacactgacacacgctgccggctatcccgggaattcctga

SEQ ID NO: 248 - DNA, 2601 bp, Artificial sequence
  Synthetic polynucleotide
atggctcgctcggtgaccctggtctttctggtgcttgtctcactgaccggtttgtatgctgcttacactgatatcgaaatgaaccgcctgggtaaggatacccaggttcaactcgtcgaatcaggaggagggtggcaaccggggagaagtcttagactgtcctgtgcagcaagtgggttcattttctctgaacataacatggcttgggtgagacaagccccaggaaaagggctcgaatgggtggcgactatttctgacgacgggagaaacacgtattatagggactccatgcgcggccggtttacaatcagtcgagataattccaaaaacacgctctaccttcaaatgaatagtctgagagctgaggacaccgctgtctactattgtacgtcacacaggtataatttgtttgattcatgggggcaagggacgatggttacagtgtcttctggaggtggaggaagtggaggcggaggcagtggtggcggtggatctgatatacaaatgactcagtcaccatcatcactcagcgcaagtgtgggtgatcgggtgactataacgtgcaaagcatcacaaaacattgaccggtatctcaactggtaccagcagaaacctgggaaagctccaaagcgactcatttacaatacaaataaacttcaaacgggggtaccttcaagattcagcggaagcgggagtgggaccgaatttactttgactatcagctcattgcagccagaggacttcgcgacgtattattgtctgcaatataactcactgcctctgacttttggacaaggcactaagctggagataaaggcggccgcaaccacgacgccagcgccgcgaccaccaacaccggcgcccaccatcgcgtcgcagcccctgtccctgcgcccagaggcgtgccggccagcggcggggggcgcagtgcacacgagggggctggacttcgcctgtgatatctacatctgggcgcccttggccgggacttgtggggtccttctcctgtcactggttatcaccctttactgcaaaggatccggcggtggtggatctgctctgagaaacgtgcccttcagatccgaggttctcggctgggaccctgatagcctggccgactacttcaagaagctgaactacaaggactgcgagaaggccgtgaagaagtaccatatcgacggcgccagattcctgaacctgaccgagaacgacatccagaagttccccaagctgagagtgcccatcctgagcaagctgagccaagagatcaacaagaacgaggaacggcggagcatcttcaccagaaagccccaggtgccaagattccccgaggaaacagagagccacgaggaagataacggcggctggtccagcttcgaagaggacgactacgagagccccaacgacgatcaggatggcgaggatgatggcgattacgagtcccctaacgaagaggaagaggcccctgttgaggacgacgccgattatgagcctcctcctagcaacgacgaagaagccctgcagaacagcatcctgcctgccaagccttttccaaacagcaacagcatgtacatcgaccggcctccaagcggcaaaacacctcagcaacctccagttcctcctcagcgacctatggctgcattgcctcctccaccagccggaagaaatcactctccactgcctccacctcagaccaatcacgaggaacccagcagaagcagacgatcactggccccatttgatagagagcccttcacactgggcaagaagcctccattcagcgacaagcctagcatccctgctggaagaagcctgggcgagcatctgcctaagatccagaaacctcctctgccacctaccaccgagagacacgagagatctagccctctgcctggcaagaaaccacctgtgcctaaacacggctggggcccagacagaagggaaaacgacgaggacgatgtgcaccagaggccattgcctcaacctgctctgctgcccatgtccagcaacacattccccagcaggtccaccaaaccttctccaatgaatcccctgcctagcagccacatgcctggcgcctttagcgagagcaatagcagctttcctcagagcgccagcctgcctccttactttagccagggacctagcaaccggccacctatcagagccgagggcagaaattttcccctgccactgcctaacaagcccagacctccatctcctgccgaggaagagaacagcctgaacgaagagtggtacgtgtcctacatcaccagacctgaagccgaggctgccctgagaaagatcaaccaggatggcacctttctcgtgcgggacagcagcaaaaagaccaccaccaatccttacgtgctgatggtgctgtacaaggacaaggtgtacaacatccagatccgctaccagaaagaaagccaggtgtacctgctcggcaccggcctgagaggcaaagaggattttctgagcgtcagcgacatcatcgactactttagaaagatgcccctgctgctgatcgacggcaagaacagaggcagcagataccagtgcacactgacacacgctgccggctatcccgggaattcctga

What is claimed is:

1. A chimeric antigen receptor (CAR) polypeptide comprising:
a) an extracellular ligand-binding domain having a binding affinity for a ligand;
b) a transmembrane domain; and
c) an intracellular signaling domain,
wherein binding of the ligand to the extracellular ligand-binding domain activates the intracellular signaling domain,
and wherein the intracellular signaling domain does not comprise an immune receptor tyrosine based activation motif (ITAM).

2. The CAR polypeptide of claim 1, wherein the intracellular signaling domain does not comprise CD3ζ.

3. The CAR polypeptide of claim 1 or 2, wherein the intracellular signaling domain comprises a full-length or biologically active fragment of a protein kinase, a G protein, a GTP-binding protein, an adaptor signaling protein, or a scaffold protein capable of inducing cell activation.

4. The CAR polypeptide any one of claims 1 to 3, wherein the intracellular signaling domain comprises ZAP70, PLCG1, PKC, ITK, NCK, VAV1, GRB2, GADS, SOS1, ADAP, SYK, LYN, PI3K, BLNK, or a biologically active fragment, mutant, or variant thereof.

5. The CAR polypeptide of any one of claims 1 to 4, wherein the intracellular signaling domain comprises ZAP70 or PLCG1, or a biologically active fragment, mutant, or variant thereof.

6. The CAR polypeptide of claim 5, wherein the biologically active fragment, mutant, or variant thereof comprises a fragment comprising Interdomain B and the kinase domain from ZAP70.

7. The CAR polypeptide of claim 5 or 6, wherein the biologically active fragment, mutant, or variant thereof comprises:
i) a ZAP70³⁰⁸⁻⁶⁰⁰ fragment, a ZAP70²⁸⁰⁻⁶⁰⁰ fragment, or a ZAP70²⁵⁵⁻⁶⁰⁰ fragment;
ii) a ZAP70³⁰⁸⁻⁶⁰⁰ fragment, a ZAP70²⁸⁰⁻⁶⁰⁰ fragment, or a ZAP70²⁵⁵⁻⁶⁰⁰ fragment, further comprising at least one of the mutations at the position of Y292, Y492, K544, Y597, Y598, V314, D327, R360, and K362;
iii) a ZAP70³⁰⁸⁻⁶⁰⁰ fragment, a ZAP70²⁸⁰⁻⁶⁰⁰ fragment, or a ZAP70²⁵⁵⁻⁶⁰⁰ fragment, further comprising at least one of the mutations of Y292F, Y492F, K544R, Y597F, Y598F, V314A, D327P, R360P, and K362E;
iv) a ZAP70^{255-600 Y292F} fragment;
v) a ZAP70^{255-600 Y492F} fragment;
vi) a ZAP70^{255-600 K544R} fragment;
vii) a ZAP70^{255-600 Y597F Y598F} fragment;
viii) a ZAP70³⁰⁸⁻⁶⁰⁰ fragment, a ZAP70²⁸⁰⁻⁶⁰⁰ fragment, or a ZAP70²⁵⁵⁻⁶⁰⁰ fragment, further comprising at least one costimulatory domain;
ix) a ZAP70³⁰⁸⁻⁶⁰⁰ fragment, a ZAP70²⁸⁰⁻⁶⁰⁰ fragment, or a ZAP70²⁵⁵⁻⁶⁰⁰ fragment, further comprising a 4-1BB costimulatory domain;
x) a ZAP70³⁰⁸⁻⁶⁰⁰ fragment, a ZAP70²⁸⁰⁻⁶⁰⁰ fragment, or a ZAP70²⁵⁵⁻⁶⁰⁰ fragment, further comprising a CD28 costimulatory domain;
xi) a ZAP70^{255-600 V314A} fragment;
xii) a ZAP70^{255-600 D327P} fragment;
xiii) a ZAP70^{255-600 R360P} fragment; or
xiv) a ZAP70^{255-600 K362E} fragment.

8. The CAR polypeptide of any one of claims 1 to 7, wherein the intracellular signaling domain comprises an amino acid sequence having at least 50%, 60%, 70%, 75%, 80%, 90%, 95%, 99%, or more identity to any one of SEQ ID NOs: 11-26, 103-110, 163, 165, 167, 169, 177, 179, 185, 188, 191, 193, and 195.

9. The CAR polypeptide of any one of claims 1 to 8, wherein the intracellular signaling domain comprises an amino acid sequence selected from SEQ ID NOs: 11-26, 103-110, 163, 165, 167, 169, 177, 179, 185, 188, 191, 193, and 195.

10. The CAR polypeptide of any one of claims 1 to 9, wherein the extracellular ligand-binding domain comprises a ligand binding domain of an antibody, an antigen-binding fragment, an antibody mimetic, a receptor, or a ligand for a targeted receptor.

11. The CAR polypeptide of claim 10, wherein the antibody or the antigen-binding fragment is selected from the group consisting of: a single chain variable fragment (scFv), a monoclonal antibody, an antigen-binding fragment (Fab), a nanobody, a diabody, a triabody, a minibody, an F(ab′)₂ fragment, an F(ab)v fragment, a single domain antibody (sdAb), a V_{H} domain, a V_{L} domain, an Fv fragment, a VNAR domain, and a VHH domain.

12. The CAR polypeptide of claim 10, wherein the antibody mimetic is selected from the group consisting of: Affibody molecules, Affilins, Affimers, Alphabodies, Avimers, DARPins, Fynomers, Kunitz domain peptides, Monobodies, nanoCLAMPs, and a biologically active fragment thereof.

13. The CAR polypeptide of any one of claims 1 to 12, wherein the extracellular ligand-binding domain is multivalent.

14. The CAR polypeptide of any one of claims 1 to 13, wherein the extracellular ligand-binding domain is multispecific.

15. The CAR polypeptide of any one of claims 1 to 14, wherein the ligand localizes on the surface of a cell.

16. The CAR polypeptide of claim 15, wherein the cell is a cancer cell.

17. The CAR polypeptide of any one of claims 1 to 16, wherein the ligand is an adaptor molecule specifically recognizing a cancer cell.

18. The CAR polypeptide of claim 16 or 17, wherein activation of the intracellular signaling domain promotes repression and/or killing of the cancer cell.

19. The CAR polypeptide of any one of claims 1 to 18, wherein the ligand is selected from the group consisting of: CD1a, CD1b, CD1c, CD2, CD3, CD4, CD5, CD6, CD7, CD8, CD9, CD10, CD11a, CD11b, CD11c, CD12, CD13, CD14, CD15 (SSEA-1), CD16 (FcγRIII), CD17, CD18, CD19, CD20, CD21, CD22, CD23, CD24, CD25, CD26, CD27, CD28, CD29, CD30, CD31, CD32 (FcγRII), CD33, CD34, CD35, CD36, CD37, CD38, CD39, CD40, CD41, CD43, CD44, CD44V6, CD45, CD45R/B220, CD45RO, CD49b, CD49d, CD49f, CD52, CD53, CD54, CD56 (NCAM), CD57, CD61 (integrin β3), CD62L, CD63, CD64, CD66b, CD68, CD69, CD70, CD73, CD74, CD79a (Igα), CD79b (Igβ), CD80, CD83, CD85k (ILT3), CD86, CD88, CD93 (C1Rqp), CD94, CD95, CD99, CD103, CD105 (Endoglin), CD107a, CD107b, CD114 (G-CSFR), CD115, CD117, CD122, CD123, CD129, CD133, CD134, CD138 (Syndecan-1), CD141, CD146, CD152 (CTLA-4), CD158 (Kir), CD161 (NK-1.1), CD163, CD183, CD191, CD193 (CCR3), CD194 (CCR4), CD195 (CCR5), CD197 (CCR7), CD203c, CD205 (DEC-205), CD207 (Langerin), CD209 (DC-SIGN), CD223, CD235, CD244 (2B4), CD252 (OX40L), CD267, CD268 (BAFF-R), CD273 (B7-DC, PD-L2), CD276 (B7-H3), CD279 (PD1), CD282 (TLR2), CD284 (TLR4), CD294, CD304 (Neuropilin-1), CD305, CD314 (NKG2D), CD319 (CRACC), CD326, CD328 (Siglec-7), CD335 (NKp46), fetal acetylcholine receptor (AChR), ADGRE2, alpha-fetoprotein (AFP), ALK, BCMA, BDCA3, C3AR, Lewis A (CA19.9), carbonic anhydrase IX (CA1X), calretinin, cancer antigen-125 (CA-125), CCR1, CCR4, CDS, carcinoembryonic antigen (CEA), chromogranin, CLEC12A, an antigen of a cytomegalovirus (CMV) infected cell (e.g., a cell surface antigen), CS-1, CSPG4, cytokeratin, desmin, DLK1, DLL3, EGFRvIII (epidermal growth factor variant III), EGFR and isovariants thereof, epithelial cell adhesion molecule (EpCAM), epithelial glycoprotein2 (EGP 2), epithelial glycoprotein-40 (EGP-40), epithelial membrane protein (EMA), ERBB, epithelial tumor antigen (ETA), FAP, folate-binding protein (FBP), FcγR1, FcεRIα, FITC, FLT3, FOLR1, FOLR3, galactin, ganlgiosides, gross cystic disease fluid protein (GCDFP-15), GD2 (ganglioside G2), GD3, GM2, GM3, glial fibrillary acidic protein (GFAP), gpA33, glycopeptides, Glypican 2 (GPC2), oncofetal antigen (h5T4), influenza hemagglutinin (HA), human epidermal growth factor receptor 2 (Her2/neu), HLA-DR, HM1.24, HMB-45 antigen, HPV E6, HPV E7, ICAM-1, IgG, IgD, IgE, IgM, IL-13-receptor alpha 1, integrins, Integrin B7, Interleukin-13 receptor subunit alpha-2 (IL-13Rα2), Kappa light chain, kinase insert domain receptor (KDR), Lamba light chain, LILRB2, Lewis Y (LeY), LGR5, Ly49, Ly108, L1 cell adhesion molecule (L1-CAM), melanoma-associated antigen (MAGE), melanoma antigen family A 1 (MAGE-A1), protein melan-A (melanoma antigen recognized by T lymphocytes; MART-1), MCSP, c-Met, MICA/B, mesothelin, muscle-specific actin (MSA), Mesothelin (MSLN), the dimeric form of the pyruvate kinase isoenzyme type M2 (tumor M2-PK), Mucin 1 (Muc-1), Mucin 16 (Muc-16), myo-D1, Necl-2, neurofilament, NKCSI, NKG2D, neuron-specific enolase (NSE), NY-ESO, cancer-testis antigen NY-ESO-1, an abnormal p53 protein, PAP (prostatic acid phosphatase), PAMA, P-cadherin, placental alkaline phosphatase, PRAIVIE, prostein, prostate stem cell antigen (PSCA), prostate-specific membrane antigen (PSMA), Ral-B, K-Ras (V-Ki-ras2 Kirsten rat sarcoma viral oncogene), an abnormal ras protein, ROR1, SLAMF7/CS1, receptor tyrosine-protein kinases erb-B2,3,4, sperm protein 17 (Sp17), STEAP1 (six-transmembrane epithelial antigen of the prostate 1), synaptophysin, tumor-associated glycoprotein 72 (TAG-72), TALLA-1, TARP (T cell receptor gamma alternate reading frame protein), TEM-8, human telomerase reverse transcriptase (hTERT), TIM-3, TLR4, TRBC1, TRBC2, Trp-p8, thyroglobulin, thyroid transcription factor-1, TYRP1, tyrosinase, vascular endothelial growth factor R2 (VEGF-R2), Vα24, Wilms tumor protein (WT-1), or any combination thereof.

20. The CAR polypeptide of any one of claims 1 to 19, wherein the transmembrane domain is derived from a transmembrane domain of CD4, CD8, CD28, PD-1, OX40, 4-1BB, CTLA-4, CD2, CD3D, CD3E, CD3G, CD3zeta, CD8a, CD8b, CD16, CD25, CD27, CD40, CD79A, CD79B, CD80, CD84, CD86, CD95, CD150 (SLAMF1), CD166, CD200R, CD223 (LAG3), CD270 (HVEM), CD272 (BTLA), CD273 (PD-L2), CD274 (PD-L1), CD278 (ICOS), CD300, CD357 (GITR), A2aR, ICAM-1, 2B4, BTLA, DAP10, FcRα, FcRβ, Fyn, GAL9, IL7, IL12, IL15, KIR, KIR2DL4, KIR2DS1, LAG-3, Lck, LAT, LPA5, LRP, NKp30, NKp44, NKp46, NKG2C, NKG2D, NOTCH1, NOTCH2, NOTCH3, NOTCH4, PTCH2, ROR2, Ryk, SLP-76, SIRPα, pTα, T cell receptor polypeptides (e.g., TCRα and TCRβ), TIM3, TRIM, ZAP70, or any combination thereof.

21. The CAR polypeptide of any one of claims 1 to 20, further comprising a hinge domain.

22. The CAR polypeptide of claim 21, wherein the hinge domain is derived from a hinge domain of CD8, CD28, CD4, IgG, PD-1, CTLA-4, CD2, LFA-1 (CD11a/CD18), CD5, CD27 (TNFRSF7), CD70, 4-1BB, OX40 (CD134), ICOS (CD278), IgG1 Fc region, IgG2 Fc region, IgG3 Fc region, IgG4 Fc region, IgE Fc region, IgM Fc region, IgA Fc region, or any combination thereof.

23. The CAR polypeptide of any one of claims 1 to 22, further comprising a costimulatory domain.

24. The CAR polypeptide of claim 23, wherein the costimulatory domain is derived from a costimulatory domain of CD28, ICOS (CD278), CD27, 4-1BB (CD137), OX40 (CD134), CD2, CD4, CD5, CD7, CD8, CD8α, CD8β, CD11a, CD11b, CD11c, CD11d, CD18, CD19, CD19a, CD29, CD30, CD30L, CD40, CD40L (CD154), CD48, CD49a, CD49D, CD49f, CD58, CD53, ICAM-1 (CD54), CD69, CD70, CD80 (B7-1), CD82, CD83, CD84, CD86 (B7-2), CD90, CD96, CD100, CD103, CD122, CD132, CD150 (SLAMF1), CD160 (BY55), CD162 (DNAM1), CD223 (LAG3), CD226, CD229, CD244, CD270 (HVEM), CD273 (PD-L2), CD274 (PD-L1), CD278, LAT, lymphocyte function-associated antigen-1 (LFA-1), LIGHT, NKG2C, NKG2D, NKp30, NKp44, NKp46, NKp80 (KLRF1), B7-H2, B7-H3, CD83 ligand, PD-1, SLP-76, Toll-like receptors (TLRs, such as TLR2), DAP10, DAP12, LAG-3, 2B4, CARD1, CTLA-4 (CD152), TRIM, ZAP70, FcERIγ, 4-1BBL, BAFF, GADS, GITR, GITR-L, BAFF-R, HVEM, CD27L, OX40L, TAC1, BLAME, CRACC, CD2F-10, NTB-A, integrin α4, integrin α4β1, integrin α4β7, IA4, ICAM-1, IL2Rβ, IL2Rγ, IL7Rα, ITGA4, ITGA6, ITGAD, ITGAE, ITGAL, ITGAM, ITGAX, ITGB1, ITGB2, ITGB7, KIRDS2, LTBR, PAG/Cbp, PSGL1, SLAMF6 (NTB-A, Ly108), SLAMF7, SLP-76, TNFR2, TRANCE/RANKL, VLA1, VLA-6, BTLA, ikaros, LAG-3, LMIR, CEACAM1, CRTAM, TCL1A, DAP12, TIM-1, Dectin-1, PDCD6, PD-1, TIM-4, TSLP, EphB6, TSLP-R, HLA-DR, or any combination thereof.

25. The CAR polypeptide of any one of claims 1 to 24, comprising an amino acid sequence having at least 50%, 60%, 70%, 75%, 80%, 90%, 95%, 99%, or more identity to any one of SEQ ID NOs: 27-49, 111-123, 148-151, 162, 164, 166, 168, 170-176, 178, 180-184, 186, 187, 189, 190, 192, 194, 196, and 198-204.

26. The CAR polypeptide of any one of claims 1 to 25, comprising an amino acid sequence selected from SEQ ID NOs: 27-49, 111-123, 148-151, 162, 164, 166, 168, 170-176, 178, 180-184, 186, 187, 189, 190, 192, 194, 196, and 198-204.

27. The CAR polypeptide of any one of claims 1 to 26, capable of activating a cell expressing the CAR polypeptide.

28. The CAR polypeptide of claim 27, wherein the cell is an immune cell.

29. The CAR polypeptide of claim 28, wherein the immune cell is a T cell, a regulatory T cell (Treg), a natural killer (NK) cell, a macrophage, a monocyte, a gamma delta T cell, a stem cell, a natural killer T (NKT) cell, an induced pluripotent stem cell (iPSC)-derived NK cell, or an induced pluripotent stem cell (iPSC)-derived T cell.

30. The CAR polypeptide of claim 27, wherein the cell is a non-immune cell.

31. The CAR polypeptide of any one of claims 1 to 30, wherein activation of the intracellular signaling domain increases cytokine production in a T cell expressing the (CAR) polypeptide.

32. The CAR polypeptide of claim 31, wherein the cytokine comprises IL-2 and/or IFN-γ.

33. The CAR polypeptide of any one of claims 1 to 32, capable of reducing T cell exhaustion, compared to a CAR polypeptide comprising CD3zeta.

34. A polynucleotide encoding the chimeric antigen receptor (CAR) polypeptide of any one of claims 1 to 33.

35. An expression vector comprising the polynucleotide of claim 34.

36. A cell expressing the CAR polypeptide of any one of claims 1 to 33.

37. A composition comprising the CAR polypeptide of any one of claims 1 to 33.

38. A method of expressing a CAR polypeptide in a cell, comprising introducing a polynucleotide of claim 34 or an expression vector of claim 35 into the cell, and inducing expression of the CAR polypeptide under a condition.

39. A composition comprising
i) a first chimeric antigen receptor (CAR) polypeptide comprising:
a) a first extracellular ligand-binding domain having a binding affinity for a first ligand;
b) a first transmembrane domain; and
c) a first intracellular signaling domain,
and
ii) a second chimeric antigen receptor (CAR) polypeptide comprising:
a) a second extracellular ligand-binding domain having a binding affinity for a second ligand different from the first ligand;
b) a second transmembrane domain; and
c) a second intracellular signaling domain,
wherein a cell expressing both CAR polypeptides is activated only when the first extracellular ligand-binding domain binds to the first ligand and the second extracellular ligand-binding domain binds to the second ligand, and
wherein neither of the first and the second intracellular signaling domain comprises an ITAM.

40. The composition of claim 39, wherein neither of the first and the second intracellular signaling domains comprises CD3ζ.

41. The composition of claim 39 or 40, wherein at least one of the first and the second intracellular signaling domains comprises a full-length or biologically active fragment of a protein kinase, a G protein, a GTP-binding protein, an adaptor signaling protein, or a scaffold protein capable of inducing cell activation.

42. The composition of any one of claims 39 to 41, wherein at least one of the first and the second intracellular signaling domains is selected from the group consisting of: LAT, SLP-76, CD28, CD2, 4-1BB, CD6, and a biologically active fragment, mutant or variant thereof.

43. The composition of claim 42, wherein at least one of the first and the second intracellular signaling domains comprises LAT or SLP-76, or a biologically active fragment, mutant or variant thereof.

44. The composition of any one of claims 39 to 43, wherein the first intracellular signaling domain comprises LAT or a biologically active fragment, mutant or variant thereof and the second intracellular signaling domain comprises SLP-76 or a biologically active fragment, mutant or variant thereof.

45. The composition of any one of claims 39 to 44, wherein the first intracellular signaling domain comprises LAT or a biologically active fragment, mutant or variant thereof and the second intracellular signaling domain comprises CD28 or a biologically active fragment, mutant or variant thereof.

46. The composition of any one of claims 42 to 45, wherein the biologically active fragment, mutant, or variant thereof comprises a mutant of LAT, SLP-76, CD28, CD2, 4-1BB, or CD6, wherein the mutant comprises at least one mutation to the corresponding wild-type sequence.

47. The composition of claim 46, wherein the at least one mutation or deletion
i) enhances the potency of the composition;
ii) reduces the background activation levels of the cell when only one of the first and the second intracellular signaling domains is activated;
iii) reduces aggregation of the first and the second CAR polypeptides in absence of the ligand; and/or
iv) reduces ubiquitination and/or degradation of the first and/or the second CAR polypeptides.

48. The composition of claim 47, wherein the at least one mutation or deletion comprises
i) a mutation of G160D, Y200F, Y220F, Y252F, Y200F/Y220F, or Y200F/Y220F/Y252F, a deletion of amino acid residues at positions 200-262, a deletion of amino acid residues at positions 28-90, a deletion of amino acid residues at positions 28-130, deletions of amino acid residues at positions 28-90 and at positions 200-262, or deletions of amino acid residues at positions 28-130 and at positions 200-262, corresponding to the wild-type LAT sequence;
ii) a mutation of K30R, a deletion of amino acid residues at positions 224-244, a deletion of amino acid residues at positions 1-81, a deletion of amino acid residues at positions 224-265, a deletion of amino acid residues at positions 224-300, or deletions of amino acid residues at positions 1-81 and at positions 224-244, 224-265, or 224-300, corresponding to the wild-type SLP-76 sequence; and/or
iii) at least one mutation in a region on the first and/or the second CAR polypeptide capable of binding to GADS and/or GRB2.

49. The composition of any one of claims 39 to 48, wherein at least one of the first and the second intracellular signaling domains comprises an amino acid sequence having at least 50%, 60%, 70%, 75%, 80%, 90%, 95%, 99%, or more identity to any one of SEQ ID NOs: 11-26, 103-110, 163, 165, 167, 169, 177, 179, 185, 188, 191, 193, and 195.

50. The composition of any one of claims 39 to 49, wherein at least one of the first and the second intracellular signaling domains comprises an amino acid sequence selected from SEQ ID NOs: 11-26, 103-110, 163, 165, 167, 169, 177, 179, 185, 188, 191, 193, and 195.

51. The composition of any one of claims 39 to 50, wherein at least one of the first and the second extracellular ligand-binding domains comprises a ligand-binding domain of an antibody, an antigen-binding fragment, an antibody mimetic, a receptor, or a ligand for a targeted receptor.

52. The composition of claim 51, wherein the antibody or the antigen-binding fragment is selected from the group consisting of: a single chain variable fragment (scFv),a monoclonal antibody, an antigen-binding fragment (Fab), a nanobody, a diabody, a triabody, a minibody, an F(ab′)₂ fragment, an F(ab)v fragment, a single domain antibody (sdAb), a V_{H} domain, a V_{L} domain, an Fv fragment, a VNAR domain, and a VHH domain.

53. The composition of claim 51, wherein the antibody mimetic is selected from the group consisting of: Affibody molecules, Affilins, Affimers, Alphabodies, Avimers, DARPins, Fynomers, Kunitz domain peptides, Monobodies, nanoCLAMPs, and a biologically active fragment thereof.

54. The composition of claim 51, wherein the receptor comprises NKG2D, or a biologically active fragment thereof.

55. The composition of claim 51, wherein the ligand for a targeted receptor is an IL-13 polypeptide, an IL-13 mutein, chlorotoxin, or a biologically active fragment thereof.

56. The composition of any one of claims 39 to 55, wherein at least one of the first and the second extracellular ligand-binding domains is multivalent.

57. The composition of any one of claims 39 to 56, wherein at least one of the first and the second extracellular ligand-binding domains is multispecific.

58. The composition of any one of claims 39 to 57, wherein at least one of the first and the second ligands localizes on the surface of a cell.

59. The composition of claim 58, wherein the cell is a cancer cell.

60. The composition of any one of claims 39 to 57, wherein at least one of the first and the second ligands is an adaptor molecule specifically recognizing a cancer cell.

61. The composition of claim 59 or 60, wherein activation of both of the first and the second intracellular signaling domains promotes repression and/or killing of the cancer cell.

62. The composition of any one of claims 39 to 61, wherein at least one of the first and the second ligands is selected from the group consisting of: CD1a, CD1b, CD1c, CD2, CD3, CD4, CD5, CD6, CD7, CD8, CD9, CD10, CD11a, CD11b, CD11c, CD12, CD13, CD14, CD15 (SSEA-1), CD16 (FcγRIII), CD17, CD18, CD19, CD20, CD21, CD22, CD23, CD24, CD25, CD26, CD27, CD28, CD29, CD30, CD31, CD32 (FcγRII), CD33, CD34, CD35, CD36, CD37, CD38, CD39, CD40, CD41, CD43, CD44, CD44V6, CD45, CD45R/B220, CD45RO, CD49b, CD49d, CD49f, CD52, CD53, CD54, CD56 (NCAM), CD57, CD61 (integrin β3), CD62L, CD63, CD64, CD66b, CD68, CD69, CD70, CD73, CD74, CD79a (Igα), CD79b (Igβ), CD80, CD83, CD85k (ILT3), CD86, CD88, CD93 (C1Rqp), CD94, CD95, CD99, CD103, CD105 (Endoglin), CD107a, CD107b, CD114 (G-CSFR), CD115, CD117, CD122, CD123, CD129, CD133, CD134, CD138 (Syndecan-1), CD141, CD146, CD152 (CTLA-4), CD158 (Kir), CD161 (NK-1.1), CD163, CD183, CD191, CD193 (CCR3), CD194 (CCR4), CD195 (CCR5), CD197 (CCR7), CD203c, CD205 (DEC-205), CD207 (Langerin), CD209 (DC-SIGN), CD223, CD235, CD244 (2B4), CD252 (OX40L), CD267, CD268 (BAFF-R), CD273 (B7-DC, PD-L2), CD276 (B7-H3), CD279 (PD1), CD282 (TLR2), CD284 (TLR4), CD294, CD304 (Neuropilin-1), CD305, CD314 (NKG2D), CD319 (CRACC), CD326, CD328 (Siglec-7), CD335 (NKp46), fetal acetylcholine receptor (AChR), ADGRE2, alpha-fetoprotein (AFP), ALK, BCMA, BDCA3, C3AR, Lewis A (CA19.9), carbonic anhydrase IX (CA1X), calretinin, cancer antigen-125 (CA-125), CCR1, CCR4, CDS, carcinoembryonic antigen (CEA), chromogranin, CLEC12A, an antigen of a cytomegalovirus (CMV) infected cell (e.g., a cell surface antigen), CS-1, CSPG4, cytokeratin, desmin, DLK1, DLL3, EGFRvIII (epidermal growth factor variant III), EGFR and isovariants thereof, epithelial cell adhesion molecule (EpCAM), epithelial glycoprotein2 (EGP 2), epithelial glycoprotein-40 (EGP-40), epithelial membrane protein (EMA), ERBB, epithelial tumor antigen (ETA), FAP, folate-binding protein (FBP), FcγR1, FcεRIα, FITC, FLT3, FOLR1, FOLR3, galactin, ganlgiosides, gross cystic disease fluid protein (GCDFP-15), GD2 (ganglioside G2), GD3, GM2, GM3, glial fibrillary acidic protein (GFAP), gpA33, glycopeptides, Glypican 2 (GPC2), oncofetal antigen (h5T4), influenza hemagglutinin (HA), human epidermal growth factor receptor 2 (Her2/neu), HLA-DR, HM1.24, HMB-45 antigen, HPV E6, HPV E7, ICAM-1, IgG, IgD, IgE, IgM, IL-13-receptor alpha 1, integrins, Integrin B7, Interleukin-13 receptor subunit alpha-2 (IL-13Rα2), Kappa light chain, kinase insert domain receptor (KDR), Lamba light chain, LILRB2, Lewis Y (LeY), LGR5, Ly49, Ly108, L1 cell adhesion molecule (L1-CAM), melanoma-associated antigen (MAGE), melanoma antigen family A 1 (MAGE-A1), protein melan-A (melanoma antigen recognized by T lymphocytes; MART-1), MCSP, c-Met, MICA/B, mesothelin, muscle-specific actin (MSA), Mesothelin (MSLN), the dimeric form of the pyruvate kinase isoenzyme type M2 (tumor M2-PK), Mucin 1 (Muc-1), Mucin 16 (Muc-16), myo-D1, Necl-2, neurofilament, NKCSI, NKG2D, neuron-specific enolase (NSE), NY-ESO, cancer-testis antigen NY-ESO-1, an abnormal p53 protein, PAP (prostatic acid phosphatase), PAMA, P-cadherin, placental alkaline phosphatase, PRAIVIE, prostein, prostate stem cell antigen (PSCA), prostate-specific membrane antigen (PSMA), Ral-B, K-Ras (V-Ki-ras2 Kirsten rat sarcoma viral oncogene), an abnormal ras protein, ROR1, SLAMF7/CS1, receptor tyrosine-protein kinases erb-B2,3,4, sperm protein 17 (Sp17), STEAP1 (six-transmembrane epithelial antigen of the prostate 1), synaptophysin, tumor-associated glycoprotein 72 (TAG-72), TALLA-1, TARP (T cell receptor gamma alternate reading frame protein), TEM-8, human telomerase reverse transcriptase (hTERT), TIM-3, TLR4, TRBC1, TRBC2, Trp-p8, thyroglobulin, thyroid transcription factor-1, TYRP1, tyrosinase, vascular endothelial growth factor R2 (VEGF-R2), Vα24, Wilms tumor protein (WT-1), or any combination thereof.

63. The composition of any one of claims 39 to 62, wherein at least one of the first and the second transmembrane domains is derived from a transmembrane domain of: CD4, CD8, CD28, PD-1, OX40, 4-1BB, CTLA-4, CD2, CD3D, CD3E, CD3G, CD3zeta, CD8a, CD8b, CD16, CD25, CD27, CD40, CD79A, CD79B, CD80, CD84, CD86, CD95, CD150 (SLAMF1), CD166, CD200R, CD223 (LAG3), CD270 (HVEM), CD272 (BTLA), CD273 (PD-L2), CD274 (PD-L1), CD278 (ICOS), CD300, CD357 (GITR), A2aR, ICAM-1, 2B4, BTLA, DAP10, FcRα, FcRβ, Fyn, GAL9, IL7, IL12, IL15, KIR, KIR2DL4, KIR2DS1, LAG-3, Lck, LAT, LPA5, LRP, NKp30, NKp44, NKp46, NKG2C, NKG2D, NOTCH1, NOTCH2, NOTCH3, NOTCH4, PTCH2, ROR2, Ryk, SLP-76, SIRPα, pTα, T cell receptor polypeptides (e.g., TCRα and TCRβ), TIM3, TRIM, ZAP70, or any combination thereof.

64. The composition of any one of claims 39 to 63, wherein the first transmembrane domain and the second transmembrane domain are different.

65. The composition of claim 64, wherein using different transmembrane domains for the first and the second CAR polypeptides reduces background activation levels of the cell when only one of the first and the second intracellular signaling domains is activated.

66. The composition of any one of claims 39 to 65, wherein the first CAR polypeptide comprises a CD4 transmembrane domain and the second CAR polypeptide comprises a CD8 or CD28 hinge/transmembrane domain.

67. The composition of any one of claims 39 to 66, wherein at least one of the first and the second CAR polypeptides further comprises a hinge domain.

68. The composition of claim 67, wherein the hinge domain is derived from a hinge domain of CD8, CD28, CD4, IgG, PD-1, CTLA-4, CD2, LFA-1 (CD11a/CD18), CD5, CD27 (TNFRSF7), CD70, 4-1BB, OX40 (CD134), ICOS (CD278), IgG1 Fc region, IgG2 Fc region, IgG3 Fc region, IgG4 Fc region, IgE Fc region, IgM Fc region, IgA Fc region, or any combination thereof.

69. The composition of claim 67 or 68, wherein the first and the second CAR polypeptides further comprise a same hinge domain.

70. The composition of claim 67 or 68, wherein the first and the second CAR polypeptides further comprise different hinge domains.

71. The composition of claim 70, wherein a pair of the hinge domains of the first and the second CAR polypeptides is selected from the group consisting of: CD8 hinge domain and CD28 hinge domain, CD4 hinge domain and IgG4 hinge domain, CD8 hinge domain and IgG4 hinge domain, and CD28 hinge domain and IgG4 hinge domain.

72. The composition of claim 70 or 71, wherein using different hinge domains for the first and the second CAR polypeptides reduces background activation levels of the cell when only one of the first and the second intracellular signaling domains is activated.

73. The composition of any one of claims 68 to 72, wherein at least one of the first and the second CAR polypeptides comprises a mutation in the hinge/transmembrane domain.

74. The composition of claim 73, wherein the mutation reduces aggregation of the first and the second CAR polypeptides in absence of the ligand.

75. The composition of any one of claims 39 to 73, wherein at least one of the first and the second CAR polypeptides further comprises a costimulatory domain.

76. The composition of claim 75, wherein the costimulatory domain is derived from a costimulatory domain of: CD28, ICOS (CD278), CD27, 4-1BB (CD137), OX40 (CD134), CD2, CD4, CD5, CD7, CD8, CD8α, CD8β, CD11a, CD11b, CD11c, CD11d, CD18, CD19, CD19a, CD29, CD30, CD30L, CD40, CD40L (CD154), CD48, CD49a, CD49D, CD49f, CD58, CD53, ICAM-1 (CD54), CD69, CD70, CD80 (B7-1), CD82, CD83, CD84, CD86 (B7-2), CD90, CD96, CD100, CD103, CD122, CD132, CD150 (SLAMF1), CD160 (BY55), CD162 (DNAM1), CD223 (LAG3), CD226, CD229, CD244, CD270 (HVEM), CD273 (PD-L2), CD274 (PD-L1), CD278, LAT, lymphocyte function-associated antigen-1 (LFA-1), LIGHT, NKG2C, NKG2D, NKp30, NKp44, NKp46, NKp80 (KLRF1), B7-H2, B7-H3, CD83 ligand, PD-1, SLP-76, Toll-like receptors (TLRs, such as TLR2), DAP10, DAP12, LAG-3, 2B4, CARD1, CTLA-4 (CD152), TRIM, ZAP70, FcERIγ, 4-1BBL, BAFF, GADS, GITR, GITR-L, BAFF-R, HVEM, CD27L, OX40L, TAC1, BLAME, CRACC, CD2F-10, NTB-A, integrin α4, integrin α4β1, integrin α4β7, IA4, ICAM-1, IL2Rβ, IL2Rγ, IL7Rα, ITGA4, ITGA6, ITGAD, ITGAE, ITGAL, ITGAM, ITGAX, ITGB1, ITGB2, ITGB7, KIRDS2, LTBR, PAG/Cbp, PSGL1, SLAMF6 (NTB-A, Ly108), SLAMF7, SLP-76, TNFR2, TRANCE/RANKL, VLA1, VLA-6, BTLA, ikaros, LAG-3, LMIR, CEACAM1, CRTAM, TCL1A, DAP12, TIM-1, Dectin-1, PDCD6, PD-1, TIM-4, TSLP, EphB6, TSLP-R, HLA-DR, or any combination thereof.

77. The composition of any one of claims 39 to 76, further comprising a third CAR polypeptide comprising:
a) a third extracellular ligand-binding domain having a binding affinity for a third ligand different from the first ligand and the second ligand;
b) a third transmembrane domain; and
c) a third intracellular signaling domain,
wherein a cell expressing all three CAR polypeptides is activated only when the first extracellular ligand-binding domain binds to the first ligand and at least one of the second and the third extracellular ligand-binding domains binds to the second or the third ligand.

78. The composition of any one of claims 39 to 77, wherein at least one of the CAR polypeptides comprises an amino acid sequence having at least 50%, 60%, 70%, 75%, 80%, 90%, 95%, 99%, or more identity to any one of SEQ ID NOs: 27-49, 111-123, 148-151, 162, 164, 166, 168, 170-176, 178, 180-184, 186, 187, 189, 190, 192, 194, 196, and 198-204.

79. The composition of any one of claims 39 to 78, wherein at least one of the CAR polypeptides comprises an amino acid sequence selected from SEQ ID NOs: 27-49, 111-123, 148-151, 162, 164, 166, 168, 170-176, 178, 180-184, 186, 187, 189, 190, 192, 194, 196, and 198-204.

80. The composition of any one of claims 39 to 79, capable of activating a cell expressing the first and the second CAR polypeptides.

81. The composition of claim 80, wherein the cell is an immune cell.

82. The composition of claim 81, wherein the immune cell is a T cell, a natural killer (NK) cell, a macrophage, a monocyte, a stem cell, a gamma delta T cell, a natural killer T (NKT) cell, an induced pluripotent stem cell (iPSC)-derived NK cell, or an iPSC-derived T cell.

83. The composition of claim 80, wherein the cell is a non-immune cell.

84. The composition of any one of claims 39 to 83, wherein activation of both of the first and the second intracellular signaling domains increases cytokine production in a T cell expressing the first and the second CAR polypeptides.

85. The composition of claim 84, wherein the cytokine comprises IL-2 and/or IFN-γ.

86. The composition of any one of claims 39 to 85, capable of reducing T cell exhaustion.

87. A composition comprising a first polynucleotide molecule and a second polynucleotide molecule, wherein the first polynucleotide molecule encodes the first chimeric antigen receptor (CAR) polypeptide in the composition of any one of claims 39 to 86, and wherein the second polynucleotide molecule encodes the second chimeric antigen receptor (CAR) polypeptide in the composition of any one of claims 39 to 86.

88. The composition of claim 87, wherein the first and the second polynucleotide molecules are conjugated together.

89. A composition comprising a first expression vector and a second expression vector, wherein the first expression vector comprises the first polynucleotide molecule of claim 87, and wherein the second expression vector comprises the second polynucleotide molecule of claim 87.

90. An expression vector comprising the conjugated first and second polynucleotide molecules in the composition of claim 88.

91. A cell expressing the composition of any one of claims 39 to 86.

92. A method of expressing of the composition of any one of claims 39 to 86 in a cell, comprising introducing the composition of claim 87 or 88, the composition of claim 89, or the expression vector of claim 90 into the cell, and inducing expression of the CAR polypeptides under a condition.

93. A method for selectively activating a cell comprising contacting the cell with a ligand, wherein the cell expresses a CAR polypeptide of any one of claims 1 to 33, wherein the binding of the ligand to the extracellular ligand-binding domain activates the intracellular signaling domain of the CAR polypeptide, thereby activating the cell.

94. A method for selectively activating a cell comprising contacting the cell with a first ligand and a second ligand, wherein the cell expresses a composition of any one of claims 39 to 86, wherein binding of the first and the second ligands to the first and the second extracellular ligand-binding domains activates the first and the second intracellular signaling domains, respectively, thereby activating the cell, wherein activation of only one of the first and the second intracellular signaling domains does not activate the cell.

95. A method of antagonizing or killing a cancer cell comprising contacting the cancer cell with a cell expressing a CAR polypeptide of any one of claims 1 to 33, wherein the cancer cell expresses or specifically recognizes the ligand, wherein binding of the ligand to the extracellular ligand-binding domain activates the cell expressing the CAR polypeptide to antagonize or kill the cancer cell.

96. A method of antagonizing or killing a cancer cell comprising contacting the cancer cell with a cell expressing a composition of any one of claims 39 to 86, wherein the cancer cell expresses or specifically recognizes both the first ligand and the second ligand, wherein binding of the first ligand to the first extracellular ligand-binding domain and binding of the second ligand to the second extracellular ligand-binding domain activate the cell expressing the composition to antagonize or kill the cancer cell.

97. A method of treating a subject having a cancer, comprising administering to the subject a pharmaceutically effective amount of cells expressing a CAR polypeptide of any one of claims 1 to 33, wherein the cancer cells in the subject express the ligand on the surface, wherein the binding of the ligand to the extracellular ligand-binding domain activates the cell expressing the CAR polypeptide to antagonize or kill the cancer cells.

98. A method of treating a subject having a cancer, comprising administering to the subject a pharmaceutically effective amount of cells expressing or specifically recognizing a composition of any one of claims 39 to 86, wherein the cancer cells in the subject express both the first ligand and the second ligand, wherein the binding of the first ligand to the first extracellular ligand-binding domain and binding of the second ligand to the second extracellular ligand-binding domain activate the cells expressing the composition to antagonize or kill the cancer cells.

99. The cell of claim 36 or 91, wherein the cell is a regulatory T cell (Treg).

100. The method of any one of claims 38 and 92-98, wherein the cell is a regulatory T cell (Treg).

101. The composition of any one of claims 39 to 86, wherein the cell is a regulatory T cell (Treg).
